(19) United States
(12) Patent Application Publication
(10) Pub. No.: US 2024/0279302 A1
(43) Pub. Date: Aug. 22, 2024

(54) OLFACTORY RECEPTOR EXPRESSING METHOD AND RESPONSE MEASUREMENT METHOD

(71) Applicant: Kao Corporation, Chuo-ku, Tokyo (JP)

(72) Inventor: Keiichi YOSHIKAWA, Haga-gun, Tochigi (JP)

(73) Assignee: Kao Corporation, Chuo-ku, Tokyo (JP)

(21) Appl. No.: 18/571,388

(22) PCT Filed: Jun. 20, 2022
(86) PCT No.: PCT/JP2022/024613

§ 371 Date: Dec. 18, 2023

(30) Foreign Application Priority Data
Jun. 22, 2021 (JP) 2021-103675
Feb. 15, 2022 (JP) 2022-021606

(51) Int. Cl. C07K 14/705; C12N 15/10; G01N 33/68

(52) U.S. Cl. CPC C07K 14/705; C12N 15/1089; G01N 33/68

(57) ABSTRACT

Provided is an approach which can express an olfactory receptor and function. The present invention provides a method for expressing an olfactory receptor polypeptide, comprising expressing, in a cell, an olfactory receptor polypeptide consisting of an amino acid sequence obtained by, in an amino acid sequence of an olfactory receptor of interest, altering at least one amino acid residue different from that in a consensus amino acid sequence to the amino acid residue at a position corresponding thereto in the consensus amino acid sequence, wherein the consensus amino acid sequence is an amino acid sequence obtained by alignment of the amino acid sequence of the olfactory receptor of interest and amino acid sequences of particular olfactory receptors.

### FIELD OF THE INVENTION

[0001] The present invention relates to an olfactory receptor expressing method and a response measurement method.

### BACKGROUND OF THE INVENTION

[0002] Odor of candidate substance has heretofore been evaluated in accordance with sensory tests by specialists in fragrance development for favorable aroma or bad odor elimination. However, problems of the sensory tests are large variations and low throughputs, for example, or necessary training of specialists who can properly evaluate odor. Accordingly, fragrance development methods using olfactory receptors as an index serving as an objective index which well reflects a human sense of smell have been reported in recent years.

[0003] In mammals such as humans, odorants are recognized by olfactory receptors on olfactory neurons which reside in the olfactory epithelium spreading over the deepest part in the nasal cavity. Odor molecules taken up into the nasal cavity act on and activate olfactory receptors. Signals from olfactory neurons caused by the activated olfactory receptors are transduced to the central nervous system so that odor is perceived. In a report of 2014, 396 functional genes were predicted as genes encoding human olfactory receptors (Non Patent Literature 1). The quality of odor perceived by us from a particular odorant is presumably determined depending on which combination of the approximately 400 olfactory receptors is activated by the odorant.

[0004] A method is disclosed which can acquire more favorable aroma by identifying an olfactory receptor which selectively responds to particular aroma among the olfactory receptors, and designing a fragrance using the receptor as an index (Patent Literature 1). Meanwhile, provided that an olfactory receptor which recognizes bad odor is identified, a fragrance working as a receptor antagonist which suppresses the bad odor recognition of the olfactory receptor can be used as a fragrance effective for odor elimination (Patent Literature 2). According to disclosure, use of a fragrance which activates an olfactory receptor important for bad odor recognition but presents no bad odor can suppress the bad odor recognition through cross-adaptation, thereby solving bad odor problems (Patent Literature 3). The identification of such olfactory receptors that recognize odorants enables industrially useful approaches of developing preferred fragrances with high efficiency.

[0005] Since responses of many olfactory receptors are selective for odorants, it is vital to first find an olfactory receptor having selectivity for target odor. However, unfortunately, it has not been easy so far to find an olfactory receptor sensitive to particular odor. An existing receptor analysis method merely succeeds in functional analysis on only about 12% of all human receptors (Non Patent Literature 2). This situation means that, for example, an approach using an antagonist fragrance which eliminates particular bad odor can merely identify and control only a limited number of olfactory receptors among the olfactory receptors involved in the bad odor recognition.

[0006] This problem has been discussed for nearly 30 years since 1991 when olfactory receptor genes were discovered. Even if cultured cells express an olfactory receptor of interest to be analyzed, the olfactory receptor protein, albeit synthesized, remains inside the cells without being translocated to the cell surface. Hence, an odorant of interest, even when administered from outside the cells, does not reach the receptor, so that the binding therebetween cannot be tested. This is presumably because olfactory neurons of the nose have molecules essential for the translocation of olfactory receptors to the cell surface (membrane expression) whereas the molecules are absent in cultured cells derived from cells other than the olfactory neurons of the nose. An RTP (receptor-transporting protein) was identified as one of such essential molecules in 2004, and the number of olfactory receptors possible to be analyzed has reached the current one (Non Patent Literature 3). However, the identification of a potential essential molecule other than RTP has been frustrated. Furthermore, cultured cells derived from olfactory neurons have not yet been established. Therefore, the analysis and functional understanding of olfactory receptors are behind the curve, and a success rate remains at only about 12% even after nearly 30 years.

[0007] In the meantime, mouse olfactory receptors which are expressed on the cell surface and mouse olfactory receptors which are not expressed thereon have been comparatively analyzed (Non Patent Literature 4). As a result, it has been found that olfactory receptors which are not membrane-expressed might have low conformational stability. Importantly, the result has shown that the amino acid properties are statistically significantly different at some sites in primary amino acid sequences of proteins between olfactory receptors capable of membrane expression and olfactory receptors incapable thereof; and the amino acids at the sites have high commonality in all of approximately 1,000 mouse olfactory receptors. This has specifically suggested that olfactory receptors which are not membrane-expressed, might cause a mutation at a position where a common amino acid is supposed to be used in a polypeptide to thereby result in a different amino acid, and thus lack conformational stability, so that the judgement of no translocation to the cell membranes is made in cultured cells. In light of this suggestion, a “consensus design technique” of introducing an amino acid having high commonality among olfactory receptors is considered to enable acquirement of an olfactory receptor of interest as a stable protein or to be efficiently expressed on the cell membranes.

[0008] Under this concept, Patent Literature 4 discloses a method for efficiently analyzing human olfactory receptors. Approximately 400 human olfactory receptors are phylogenetically classified into 18 groups. As for each group, the analysis employs one type of consensus olfactory receptor designed by adopting an amino acid sequence having the highest commonality (paralog consensus) in an olfactory receptor group constituting the group. However, this method cannot evaluate the respective functions of approximately 400 olfactory receptors of humans. Meanwhile, in Non Patent Literature 2, in order to understand functions of a particular human olfactory receptor, the consensus design of the receptor has been performed by using commonality among evolutionary homologous genes, not commonality in the group, as an index. Specifically, as for three types of human olfactory receptors, OR6Y1, OR6B2, and OR56A4, consensus olfactory receptors OR6Y1, OR6B2, and OR56A4 have been prepared by introducing an amino acid having high commonality among homologous genes of 10 types of mammals (gorillas, bonobos, chimpanzees, Sumatran orangutans, rhesus macaques, drills, common marmosets, gray mouse lemurs, rats, and mice) into each human olfactory receptor. As a result, among the three olfactory receptors, OR6Y1 has attained response measurement to an odorant using cultured cells according to the disclosure. This suggests that response analysis is attained at a probability of ⅓ by introducing a common amino acid among evolutionary homologous genes in order to analyze a particular human olfactory receptor.

[0009] Nonetheless, even if this method is applied, human olfactory receptors which can be analyzed presumably remain at about ⅓ of approximately 400 types. This low efficiency is also supported by previous findings from studies. The consensus design method has been carried out from long ago in order to design industrially useful enzymes as more stable one. However, Non Patent Literature 5, which gives a review regarding this technique, points out that the probability of obtaining an improving effect by introducing consensus design to an amino acid sequence at a location is about 50% whereas the remaining 40% has the risk of changing a protein for the worse; thus the consensus design method is difficult to exploit. There exists an idea that the application of the consensus design method is not proper for research aimed at predicting inherent functions of olfactory receptors. Specifically, an approach of introducing amino acid substitution might change a ligand binding site of the original olfactory receptor and consequently cause inherent odor responsiveness to be no longer observed. Thus, the consensus design is expected to have two risks, a low success rate and change in inherent functions of an olfactory receptor of interest, and therefore, has not yet been tested for its effectiveness for a wide range of olfactory receptors in any case.
[0010] (Patent Literature 1) JP-A-2018-074944
[0011] (Patent Literature 2) JP-A-2020-10629
[0012] (Patent Literature 3) JP-A-2016-224039
[0013] (Patent Literature 4) WO 2020/006108
[0014] (Non Patent Literature 1) Niimura Y et al., Genome Research 24, 1485-1496 (2014)
[0015] (Non Patent Literature 2) Trimmer C et al., PNAS 116: 9475-9480 (2019)
[0016] (Non Patent Literature 3) Saitou H et al., Cell. 119: 679-91 (2004)
[0017] (Non Patent Literature 4) Ikegami K et al., PNAS 117: 2957-2967 (2020)
[0018] (Non Patent Literature 5) Porebski T B et al., Protein Engineering, Design & Selection 29: 245-251 (2016)

### SUMMARY OF THE INVENTION

[0019] The present invention provides the following 1) to 12).

[0020] 1) A method for expressing an olfactory receptor polypeptide, comprising
[0021] expressing, in a cell, an olfactory receptor polypeptide consisting of an amino acid sequence obtained by, in an amino acid sequence of an olfactory receptor of interest, altering at least one amino acid residue different from that in a consensus amino acid sequence to an amino acid residue at a position corresponding thereto in the consensus amino acid sequence, wherein
[0022] the consensus amino acid sequence is an amino acid sequence derived by alignment of the amino acid sequence of the olfactory receptor of interest and amino acid sequences of any of the following olfactory receptors (a) to (d):
[0023] (a) at least 11 olfactory receptors selected from the group consisting of olfactory receptors encoded by orthologs of the olfactory receptor of interest in the same order as that of an organism species from which the olfactory receptor of interest is derived;
[0024] (b) at least 11 olfactory receptors selected from the group consisting of the olfactory receptors encoded by orthologs of the olfactory receptor of interest in the same order as that of an organism species from which the olfactory receptor of interest is derived and olfactory receptors encoded by paralogs of the olfactory receptor of interest, the 11 olfactory receptors including at least one of the olfactory receptors encoded by the paralogs of the olfactory receptor of interest;
[0025] (c) at least 11 olfactory receptors selected from the group consisting of olfactory receptors encoded by orthologs of the olfactory receptor of interest in vertebrates, the 11 olfactory receptors including at least one olfactory receptor encoded by a vertebrate ortholog in an order different from the order of an organism species from which the olfactory receptor of interest is derived; and
[0026] (d) at least 11 olfactory receptors selected from the group consisting of olfactory receptors encoded by orthologs of the olfactory receptor of interest in vertebrates and olfactory receptors encoded by orthologs in a vertebrate with a paralog having the highest homology to the olfactory receptor of interest among paralogs of the olfactory receptor of interest having 11 or more vertebrate orthologs, the 11 olfactory receptors including at least one olfactory receptor encoded by a vertebrate ortholog in an order different from the order of an organism species from which the olfactory receptor of interest is derived, and an olfactory receptor encoded by the paralog.

[0027] 2) A method for expressing an olfactory receptor polypeptide, comprising
[0028] expressing, in a cell, an olfactory receptor polypeptide consisting of an amino acid sequence obtained by, in an amino acid sequence of an olfactory receptor of interest, altering at least one amino acid residue different from that in a consensus amino acid sequence to an amino acid residue at a position corresponding thereto in the consensus amino acid sequence, wherein
[0029] the olfactory receptor polypeptide consists of an amino acid sequence obtained by, in the amino acid sequence of SEQ ID NO: 96 of human olfactory receptor OR7E24, altering at least one amino acid residue different from that in the consensus amino acid sequence of SEQ ID NO: 210 to an amino acid residue at a position corresponding thereto in the consensus amino acid sequence,
[0030] the olfactory receptor polypeptide consists of an amino acid sequence obtained by, in the amino acid sequence of SEQ ID NO: 484 of human olfactory receptor OR9K2, altering at least one amino acid residue different from that in the consensus amino acid sequence of SEQ ID NO: 642 to an amino acid residue at a position corresponding thereto in the consensus amino acid sequence, or
[0031] the olfactory receptor polypeptide consists of an amino acid sequence obtained by, in the amino acid sequence of SEQ ID NO: 850 of human olfactory receptor OR5I1, altering at least one amino acid residue different from that in the consensus amino acid sequence of SEQ ID NO: 900 to an amino acid residue at a position corresponding thereto in the consensus amino acid sequence.

[0032] 3) A method for measuring a response of an olfactory receptor of interest, comprising
[0033] measuring a response of an olfactory receptor polypeptide expressed by the method according to 1) or 2).

[0034] 4) A method for searching for a ligand for an olfactory receptor of interest, comprising:
[0035] measuring a response of an olfactory receptor polypeptide expressed by the method according to 1) or 2) in the presence of a test substance; and
[0036] selecting a test substance to which the olfactory receptor polypeptide has responded.

[0037] 5) A method for evaluating and/or selecting a suppressor of odor of a ligand for an olfactory receptor of interest, comprising:
[0038] adding a test substance and the ligand for an olfactory receptor of interest to an olfactory receptor polypeptide expressed by the method according to 1) or 2); and
[0039] measuring a response of the olfactory receptor polypeptide to the ligand.

[0040] 6) A method for evaluating and/or selecting a suppressor of odor of a ligand for an olfactory receptor of interest, comprising:
[0041] adding a test substance to an olfactory receptor polypeptide expressed by the method according to 1) or 2); and
[0042] measuring a response of the olfactory receptor polypeptide to the test substance.

[0043] 7) A method for evaluating and/or selecting an enhancer of odor of a ligand for an olfactory receptor of interest, comprising:
[0044] adding a test substance and the ligand for an olfactory receptor of interest to an olfactory receptor polypeptide expressed by the method according to 1) or 2); and
[0045] measuring a response of the olfactory receptor polypeptide to the ligand.

[0046] 8) An altered olfactory receptor polypeptide consisting of
[0047] an amino acid sequence obtained by, in an amino acid sequence of an olfactory receptor of interest, altering at least one amino acid residue different from that in a consensus amino acid sequence to an amino acid residue at a position corresponding thereto in the consensus amino acid sequence, wherein
[0048] the consensus amino acid sequence is an amino acid sequence obtained by alignment of the amino acid sequence of the olfactory receptor of interest and amino acid sequences of any of the following olfactory receptors (a) to (d):
[0049] (a) at least 11 olfactory receptors selected from the group consisting of olfactory receptors encoded by orthologs of the olfactory receptor of interest in the same order as that of an organism species from which the olfactory receptor of interest is derived;
[0050] (b) at least 11 olfactory receptors selected from the group consisting of the olfactory receptors encoded by orthologs of the olfactory receptor of interest in the same order as that of an organism species from which the olfactory receptor of interest is derived and olfactory receptors encoded by paralogs of the olfactory receptor of interest, the 11 olfactory receptors including at least one of the olfactory receptors encoded by the paralogs of the olfactory receptor of interest;
[0051] (c) at least 11 olfactory receptors selected from the group consisting of olfactory receptors encoded by orthologs of the olfactory receptor of interest in vertebrates, the 11 olfactory receptors including at least one olfactory receptor encoded by a vertebrate ortholog in an order different from the order of an organism species from which the olfactory receptor of interest is derived; and
[0052] (d) at least 11 olfactory receptors selected from the group consisting of olfactory receptors encoded by orthologs of the olfactory receptor of interest in vertebrates and olfactory receptors encoded by orthologs in a vertebrate with a paralog having the highest homology to the olfactory receptor of interest among paralogs of the olfactory receptor of interest having 11 or more vertebrate orthologs, the 11 olfactory receptors including at least one olfactory receptor encoded by a vertebrate ortholog in an order different from the order of an organism species from which the olfactory receptor of interest is derived, and an olfactory receptor encoded by the paralog.

[0053] 9) An altered olfactory receptor polypeptide
[0054] consisting of an amino acid sequence obtained by, in amino acid sequence of SEQ ID NO: 96 of human olfactory receptor OR7E24, altering at least one amino acid residue different from that in the consensus amino acid sequence of SEQ ID NO: 210 to an amino acid residue at a position corresponding thereto in the consensus amino acid sequence,
[0055] consisting of an amino acid sequence obtained by, in the amino acid sequence of SEQ ID NO: 484 of human olfactory receptor OR9K2, altering at least one amino acid residue different from that in the consensus amino acid sequence of SEQ ID NO: 642 to an amino acid residue at a position corresponding thereto in the consensus amino acid sequence, or
[0056] consisting of an amino acid sequence obtained by, in the amino acid sequence of SEQ ID NO: 850 of human olfactory receptor OR5I1, altering at least one amino acid residue different from that the consensus amino acid sequence of SEQ ID NO: 900 to an amino acid residue at a position corresponding thereto in the consensus amino acid sequence.

[0057] 10) A polynucleotide encoding the altered olfactory receptor polypeptide according to 8) or 9).

[0058] 11) A vector or a DNA fragment comprising the polynucleotide according to 10).

[0059] 12) A transformed cell comprising the vector or the DNA fragment according to 11).

### BRIEF DESCRIPTION OF DRAWINGS

[0060] FIG. 1 shows a cell membrane expression level and odor responsiveness of each designed consensus olfactory receptor. Four histograms and one bar graph from the left depict a receptor protein level on HEK293 cell membranes determined by flow cytometry. Cells expressing no receptor (Mock) and cells expressing a receptor M2AcR with efficient membrane expression were analyzed as controls. Results of measuring ligand responsiveness of each receptor by luciferase assay are shown on the right. The error bar represents SEM (n=3).

[0061] FIG. 2 shows ligand selectivity of each designed consensus olfactory receptor. Results of luciferase assay are shown. The error bar represents SEM (n=3).

[0062] FIG. 3 shows ligand selectivity of each designed consensus olfactory receptor. Results of luciferase assay are shown. The error bar represents SEM (n=3). The numbers shown in the lower part respectively correspond to odorant numbers shown in Table 8 given below.

[0063] FIG. 4 shows a cell membrane expression level of each designed consensus olfactory receptor. Each graph depicts a receptor protein level on HEK293 cell membranes determined by flow cytometry. The comparison between the original human olfactory receptor and a receptor to which mammalian consensus design was applied is illustrated as to each of 34 receptors. The error bar represents SEM (n=3 or 4).

[0064] FIG. 5 shows luciferase assay of each olfactory receptor. Varied concentrations of odorants were administered to 3 types of human olfactory receptors and their consensus olfactory receptors, and responses were measured. The error bar represents SEM (n=3).

[0065] FIG. 6 shows luciferase assay of each olfactory receptor. Varied concentrations of odorants were administered to 8 types of human olfactory receptors and their consensus olfactory receptors, and responses were measured. The error bar represents SEM (n=3).

[0066] FIG. 7 shows luciferase assay of each olfactory receptor. In HEK293 cells, each of 4 types of consensus olfactory receptors harboring amino acid substitution reported to cause difference among individuals was expressed. Varied concentrations of odorants were administered thereto, and responses were measured. The error bar represents SEM (n=3).

[0067] FIG. 8 shows a cell membrane expression level of each designed consensus olfactory receptor. Each graph depicts a receptor protein level on HEK293 cell membranes determined by flow cytometry. The comparison between the original human olfactory receptor and a receptor to which mammalian consensus design was applied is illustrated as to each receptor. The error bar represents SEM (n=3).

[0068] FIGS. 9A and 9B show cell membrane expression levels of OR5AN1 and consensus OR5AN1. FIG. 9A is a histogram depicting the distribution of PE fluorescent signals of a cell population expressing each receptor. Cells expressing no receptor (Mock) and cells expressing a receptor M2AchR with efficient membrane expression were analyzed as controls. FIG. 9B shows results of quantifying the membrane expression levels in FIG. 9A. The error bar represents SEM (n=3). FIG. 9C shows responses of OR5AN1 (Ori.) and consensus OR5AN1 (Con.) to various odorants (100 μM). The error bar represents SEM (n=3). The numbers on the ordinate correspond to odorant numbers shown in Table 19 given below. FIG. 9D shows dose dependence for 7 odorants. A mean and SEM from three replicas from one experiment are shown.

[0069] FIG. 10 shows luciferase assay of each olfactory receptor. Each bar graph depicts response intensity when varied concentrations of methyl mercaptan (MeSH), dimethyl sulfide (DMS), dimethyl disulfide (DMDS), or dimethyl trisulfide (DMTS) were administered to each consensus olfactory receptor and the original olfactory receptor. The error bar represents SEM (from three replicas in one experiment).

[0070] FIG. 11 shows luciferase assay of each olfactory receptor. Each bar graph depicts a signal value when 100 μM MeSH, DMS, DMDS, or DMTS was administered to each consensus olfactory receptor and the original olfactory receptor in the presence or absence of a copper ion. The error bar represents SEM (from three replicas in one experiment).

### DETAILED DESCRIPTION OF THE INVENTION

[0071] In the present specification, the “olfactory receptor polypeptide” refers to an olfactory receptor or a polypeptide functionally equivalent thereto. The polypeptide functionally equivalent to the olfactory receptor refers to a polypeptide which can be expressed on cell membranes, as in the olfactory receptor, is activated through the binding of an odor molecule, and when activated, coupled to Gas in cells to activate adenylate cyclase, thereby having a function of increasing intracellular cAMP levels (Nat. Neurosci., 2004, 5: 263-278).

[0072] In the present specification, the term “functionally expressing” the olfactory receptor polypeptide in cells means that the expressed olfactory receptor polypeptide functions as an odorant receptor in the cells.

[0073] In the present specification, the “agonist” refers to a substance which binds to and activates a receptor. In the present specification, the “antagonist” refers to a substance which binds to a receptor but does not activate the receptor, or suppresses a response of the receptor to an agonist.

[0074] In the present specification, the “olfactory receptor agonism” refers to binding to a receptor to activate the receptor.

[0075] In the present specification, the “odor cross-adaptation (or olfactory cross-adaptation)” regarding target odor refers to a phenomenon in which olfactory sensitivity to a causative substance of target odor is reduced or changed by receiving in advance odor of a substance different from the causative substance of the target odor and acclimatizing to the odor. The present inventor and so on previously revealed that the “odor cross-adaptation” is a phenomenon based on olfactory receptor agonism (WO 2016/194788). Specifically, in the “odor cross-adaptation”, an olfactory receptor for a causative substance of target odor responds to a causative substance of different odor prior to the responding to the causative substance of the target odor, and is subsequently desensitized so that the olfactory receptor merely low responds to the causative substance of the target odor even when later exposed thereto, resulting in reduction in the intensity or degeneration of the target odor to be recognized by individuals. In the present specification, the mechanism of the odor cross-adaptation caused by such a behavior of an olfactory receptor is also referred to as the “odor cross-adaptation ascribable to olfactory receptor agonism”.

[0076] In the present specification, the “suppression ascribable to olfactory receptor antagonism” regarding target odor means that an antagonist suppresses a response of an olfactory receptor to a substance having the target odor, resulting in the suppression of the target odor to be recognized by individuals.

[0077] In the present specification, the identity between nucleotide sequences or amino acid sequences is calculated by the Lipman-Pearson method (Science, 1985, 227: 1435-41). Specifically, the identity is calculated by conducting analysis using homology analysis (Search Homology) program of genetic information processing software Genetyx-Win (Ver. 5.1.1; Software Development K.K.) with Unit size to compare (ktup) set to 2.

[0078] In the present specification, the “amino acid residue” means any of 20 amino acid residues constituting a protein: alanine (Ala or A), arginine (Arg or R), asparagine (Asn or N), aspartic acid (Asp or D), cysteine (Cys or C), glutamine (Gln or Q), glutamic acid (Glu or E), glycine (Gly or G), histidine (His or H), isoleucine (Ile or I), leucine (Leu or L), lysine (Lys or K), methionine (Met or M), phenylalanine (Phe or F), proline (Pro or P), serine (Ser or S), threonine (Thr or T), tryptophan (Trp or W), tyrosine (Tyr or Y), and valine (Val or V).

[0079] In the present specification, the alteration of an amino acid is also represented by [original amino acid, position, altered amino acid] in accordance with the authorized single-letter amino acid abbreviation of IUPAC. For example, the alteration of histidine at position 43 to arginine is represented by “H43R”.

[0080] In the present specification, the “position corresponding” on an amino acid sequence can be determined by arranging (aligning) a sequence of interest and a reference sequence (in the present invention, an amino acid sequence of the original olfactory receptor) so as to give the largest homology. The alignment of amino acid sequences can be carried out using an algorithm known in the art, and procedures thereof are known to those skilled in the art. The alignment can be performed, for example, by using Clustal W multiple alignment program (Thompson, J. D. et al., 1994, Nucleic Acids Res. 22: 4673-4680) at default setting. Alternatively, Clustal W2 or Clustal omega, a revised version of Clustal W, may be used. Clustal W, Clustal W2, and Clustal omega are available, for example, on the website of Clustal run by University College Dublin [www.clustal.org] or European Bioinformatics Institute (EBI) [www.ebi.ac.uk/index.html] or the website of DNA Data Bank of Japan (DDBJ) run by National Institute of Genetics [www.ddbj.nig.ac.jp/searches-j.html]. A position in the sequence of interest aligned with an arbitrary position in the reference sequence by the alignment mentioned above is regarded as the “position corresponding” to the arbitrary position.

[0081] Those skilled in the art can finely adjust and optimize the alignment of the amino acid sequences thus obtained. Such optimized alignment is preferably determined in consideration of similarity between the amino acid sequences, the frequency of a gap to be inserted, and the like. In this context, the similarity between the amino acid sequences refers to, when the two amino acid sequences are aligned, the ratio (%) of the number of positions where the same or similar amino acid residues exist in both the sequences relative to the number of full-length amino acid residues. The similar amino acid residues mean amino acid residues having properties similar to each other in terms of polarity or charge so as to cause so-called conservative substitution, among 20 amino acids constituting a protein. Groups of such similar amino acid residues are well known to those skilled in the art. Examples thereof include, but are not limited to, arginine and lysine or glutamine; glutamic acid and aspartic acid or glutamine; serine and threonine or alanine; glutamine and asparagine or arginine; and leucine and isoleucine.

[0082] In addition, the alignment of the amino acid sequences thus obtained can be finely adjusted and optimized, for example, with reference to highly conserved amino acids or amino acid motifs among olfactory receptors. Examples of the highly conserved amino acids among olfactory receptors which can be used for this purpose include the most highly conservative amino acids among amino acids constituting transmembrane regions in each olfactory receptor. An additional example thereof includes cysteine which forms an intramolecular disulfide bond. Examples of the highly conserved amino acid motifs among olfactory receptors include LHTPMY positioned in the first intracellular loop, MAYDRYVAIC positioned from the latter half of the third transmembrane region to the former half of the second intracellular loop, SY positioned in the latter half of the fifth transmembrane region, KAFSTCASH positioned in the former half of the sixth transmembrane region, and PMLNPFIY positioned in the seventh transmembrane region.

[0083] In the present specification, the “operable linkage” of a control region such as a promoter to a gene refers to the linkage of the gene and the control region such that the gene can be expressed under the control of the control region. Procedures of the “operable linkage” of the gene and the control region are well known to those skilled in the art.

[0084] In the present specification, the terms “upstream” and “downstream” regarding a gene refer to upstream and downstream in the transcriptional directions of the gene. For example, the term “gene located downstream of a promoter” means that the gene resides on a 3′ side of the promoter in a DNA sense strand, and the term “upstream of a gene” means a region on a 5′ side of the gene in a DNA sense strand.

[0085] In the present specification, the “homolog” refers to homologous genes derived from a common ancestor. The “ortholog”, also called “orthologue”, refers to a homolog which has diverged after a specification event. The orthologs reside in different organism species and have the same or similar functions. However, in general, olfactory receptor genes undergo duplication and deletion at high frequencies in each organism species, and have many pseudogenes. Therefore, it is allegedly difficult to strictly determine an orthologous relationship. As one example, the ortholog used in the present invention can be an olfactory receptor gene which involves the same name as that a gene of an olfactory receptor of interest and which is of an organism species different from the organism species from which the olfactory receptor of interest is derived, among homologous genes of the gene of the olfactory receptor of interest. When the nomenclature of an olfactory receptor of an organism species is different from the nomenclature in the organism species from which the olfactory receptor of interest is derived, the ortholog may be an olfactory receptor gene having high homology, preferably an olfactory receptor gene having the highest homology, to the gene of the olfactory receptor of interest in the organism species. Alternatively, the ortholog may be an olfactory receptor gene known to be an ortholog of the gene of the olfactory receptor of interest in the organism species. As another example, the ortholog used in the present invention can be an olfactory receptor gene suggested to have the possibility that the gene has diverged after a specification event by phylogenetic tree analysis among the orthologs as above. On the other hand, the “paralog” refers to a homolog resulting from gene duplication. The paralogs reside in the same organism species. The paralogs may have the same or similar functions or may have different functions. As one example, the paralog used in the present invention can be an olfactory receptor gene having high homology, preferably an olfactory receptor gene having the highest homology, to the gene of the olfactory receptor of interest, among olfactory receptor genes of the organism species from which the olfactory receptor of interest is derived.

[0086] Ligands remain to be elucidated for many olfactory receptors. There is a demand for the elucidation of ligands for these olfactory receptors or odor responsiveness thereof.

[0087] The present inventor conducted diligent studies on an approach which can express on a cultured cell membrane and function an olfactory receptor in light of many olfactory receptors that cannot be functionally analyzed due to insufficient membrane expression in cultured cells. As a result, the present inventor found that consensus design of an olfactory receptor different from a conventional method can improve the membrane expression of an olfactory receptor in cultured cells in comparison with the original olfactory receptor; the consensus design can improve the odor responsiveness of an olfactory receptor; the consensus design can improve the odor responsiveness of an olfactory receptor even if the membrane expression of the olfactory receptor in cultured cells is not improved in comparison with the original olfactory receptor; and the olfactory receptor obtained by the consensus design can well maintain the ligand selectivity of the original olfactory receptor before the consensus design; and analysis results brought about by the olfactory receptor obtained by the consensus design well reflect a human sense of smell.

[0088] The present invention provides an approach which can express on a cell membrane and function an olfactory receptor which well maintains the ligand selectivity of the original olfactory receptor. Use of the olfactory receptor enables examination of functions or properties of the original olfactory receptor for which neither a ligand nor odor responsiveness has been confirmed so far. Thus, the approach of the present invention is effective for explaining and predicting how an odorant acts on a human sense of smell and what odor perception the odorant produces.

[0089] As shown in Examples mentioned later, the present inventor altered an amino acid sequence of a human olfactory receptor on the basis of a consensus amino acid sequence derived from the amino acid sequence of the human olfactory receptor and amino acid sequences of olfactory receptors encoded by particular orthologs or particular orthologs and paralogs of the human olfactory receptor, and expressed the obtained olfactory receptor polypeptide in cells. As a result, the present inventor found that the membrane expression of the olfactory receptor polypeptide in the cells can be increased in comparison with the human olfactory receptor before the alteration (FIG. 1). As a result of altering a mouse olfactory receptor in the same manner as in the case of the human olfactory receptor, and expressing the obtained olfactory receptor polypeptide in cells, the present inventor found that the membrane expression of the olfactory receptor polypeptide in the cells can be increased in comparison with the mouse olfactory receptor before the alteration. Specifically, the olfactory receptor polypeptide is improved in expression stability in comparison with the olfactory receptor before the alteration. In the present specification, the olfactory receptor before the alteration is also referred to as the “original olfactory receptor”; the alteration of an amino acid sequence of an olfactory receptor on the basis of a consensus amino acid sequence is also referred to as the “consensus design”; and the olfactory receptor obtained by the consensus design is also referred to as the “consensus olfactory receptor” or the “altered olfactory receptor polypeptide” in some cases.

[0090] As shown in Examples mentioned later, the present inventor also found that when the membrane expression of the consensus olfactory receptor in cells is increased in comparison with the original human olfactory receptor, its responsiveness is also improved; when the membrane expression of the consensus olfactory receptor is increased even slightly, its responsiveness is sufficiently improved (FIG. 1); and further importantly, the consensus olfactory receptor well maintains the ligand selectivity of the original human olfactory receptor (FIGS. 2 and 3). The present inventor also performed consensus design as to 34 types of human olfactory receptors whose responsiveness to a ligand candidate substance had not been demonstrated in preceding studies although the ligand candidate substance had been identified. As a result, the present inventor found that the membrane expression of the olfactory receptors as many as approximately 85% is increased (FIG. 4). The present inventor further performed the consensus design of a human olfactory receptor never before possible to functionally analyze, and thereby confirmed that olfactory receptors predicted as candidates of an olfactory receptor which responds to an odorant actually exhibit responsiveness to the odorant (FIGS. 5 and 6). These olfactory receptors include receptors reported to fail response measurement in Non Patent Literature 2, though consensus design has been attempted. The present inventor further confirmed that receptor responsiveness consistent with different sensory evaluation results found in a human population can be observed by applying consensus design to a human olfactory receptor never before possible to functionally analyze, and then introducing thereto an amino acid sequence found to have difference among individuals in the human population (FIG. 7). Moreover, the present inventor revealed that the consensus design of the present invention is effective for a larger number of olfactory receptors (FIG. 8 and Tables 12, 14, 15, and 17).

[0091] As shown in Examples mentioned later, the present inventor further found that even when the membrane expression of the consensus olfactory receptor in cells is equivalent and is not increased in comparison with the original human olfactory receptor, the consensus olfactory receptor well maintains the ligand selectivity of the original human olfactory receptor and is improved in responsiveness (FIG. 9). The improved responsiveness, despite no increase in membrane expression level, suggests the possibility that the consensus design of an olfactory receptor enhances the efficiency of shift of the olfactory receptor to an active structure or the efficiency of coupling to G protein in cells.

[0092] Accordingly, the consensus design of an olfactory receptor is useful for expressing in cells and function an olfactory receptor which well maintains its ligand selectivity therein, particularly, an olfactory receptor never before possible to functionally analyze due to insufficient membrane expression in cultured cells. Thus, in one aspect, the present invention provides a method for expressing an olfactory receptor polypeptide. The expression method of the present invention enables improved expression (e.g., increased expression and stabilized expression) of an olfactory receptor. Therefore, the method is preferably a method for improving expression of an olfactory receptor polypeptide. The method includes expressing, in a cell, an olfactory receptor polypeptide consisting of an amino acid sequence obtained by, in an amino acid sequence of an olfactory receptor of interest, altering at least one amino acid residue different from that in a consensus amino acid sequence to an amino acid residue at a position corresponding thereto in the consensus amino acid sequence, wherein
[0093] the consensus amino acid sequence is an amino acid sequence derived by alignment of the amino acid sequence of the olfactory receptor of interest and amino acid sequences of any of the following olfactory receptors (a) to (d):
[0094] (a) at least 11 olfactory receptors selected from the group consisting of olfactory receptors encoded by orthologs of the olfactory receptor of interest in the same order as that of an organism species from which the olfactory receptor of interest is derived;
[0095] (b) at least 11 olfactory receptors selected from the group consisting of the olfactory receptors encoded by orthologs of the olfactory receptor of interest in the same order as that of an organism species from which the olfactory receptor of interest is derived and olfactory receptors encoded by paralogs of the olfactory receptor of interest, the 11 olfactory receptors including at least one of the olfactory receptors encoded by the paralog of the olfactory receptor of interest;
[0096] (c) at least 11 olfactory receptors selected from the group consisting of olfactory receptors encoded by orthologs of the olfactory receptor of interest in vertebrates, the 11 olfactory receptors including at least one olfactory receptor encoded by a vertebrate ortholog in an order different from the order of an organism species from which the olfactory receptor of interest is derived; and
[0097] (d) at least 11 olfactory receptors selected from the group consisting of olfactory receptors encoded by orthologs of the olfactory receptor of interest in vertebrates and olfactory receptors encoded by orthologs in a vertebrate with a paralog having the highest homology to the olfactory receptor of interest among paralogs of the olfactory receptor of interest having 11 or more vertebrate orthologs, the 11 olfactory receptors including at least one olfactory receptor encoded by a vertebrate orthologs in an order different from the order of an organism species from which the olfactory receptor of interest is derived, and
[0098] an olfactory receptor encoded by the paralog.

[0099] In the expression method of the present invention, the olfactory receptor of interest is not particularly limited and is preferably an olfactory receptor for which improvement in responsiveness in cells, or improvement in cell membrane expression and responsiveness is desired. The olfactory receptor of interest may be an olfactory receptor of any organism species and is preferably a mammalian olfactory receptor, more preferably a human olfactory receptor. An olfactory receptor of any family, subfamily, or member may be used. Olfactory receptor families differ depending on a species. Examples of human olfactory receptor families include OR1, OR2, OR3, OR4, OR5, OR6, OR7, OR8, OR9, OR10, OR11, OR12, OR13, OR14, OR51, OR52, OR55, and OR56. The olfactory receptor of interest may be an olfactory receptor that can or cannot be functionally analyzed using cultured cells by a conventional technique. The method of the present invention is more suitably applied to an olfactory receptor that cannot be functionally analyzed using cultured cells by a conventional technique.

[0100] In the expression method of the present invention, the olfactory receptors (a) are olfactory receptors encoded by orthologs of the olfactory receptor of interest in the same order as that of an organism species from which the olfactory receptor of interest is derived. The orthologs are not particularly limited and are preferably orthologs having higher homology to the gene of the olfactory receptor of interest.

[0101] In a preferred example of the present embodiment, the orthologs of the olfactory receptor of interest in the same order as that of an organism species from which the olfactory receptor of interest is derived in (a) are genes involving the same name as that of the gene of the olfactory receptor of interest among olfactory receptor genes of organism species belonging to the order. The orthologs can be selected by, for example, the following procedures: database search is performed with NCBI BLAST or the like by setting the amino acid sequence of the olfactory receptor of interest to a query sequence and an organism name to be searched to the same order as that of an organism species from which the olfactory receptor of interest is derived. The genes involving the same name as that of the gene of the olfactory receptor of interest are selected from the resulting homologous gene group (e.g., top 500 genes, preferably top 250 genes, more preferably top 100 genes, further more preferably top 50 genes).

[0102] In a more preferred example of the present embodiment, the orthologs of the olfactory receptor of interest in the same order as that of an organism species from which the olfactory receptor of interest is derived in (a) are olfactory receptor genes of organism species belonging to the order and are genes suggested to have the possibility that the genes diverged after a specification event by phylogenetic tree analysis among the genes involving the same name as that of the gene of the olfactory receptor of interest. The orthologs can be selected by, for example, the following procedures: database search is performed with NCBI BLAST or the like by setting the amino acid sequence of the olfactory receptor of interest to a query sequence and an organism name to be searched to the same order as that of an organism species from which the olfactory receptor of interest is derived. A phylogenetic tree is prepared by an approach known in the art using the resulting homologous gene group (e.g., top 500 genes, preferably top 250 genes, more preferably top 100 genes, further more preferably top 50 genes). A clade is identified which includes as many genes involving the same name as that of the gene of the olfactory receptor of interest as possible and as few other genes as possible. Then, genes included in the identified clade are selected.

[0103] When a plurality of genes derived from the same organism species are selected as orthologs, only one gene having the highest homology to the gene of the olfactory receptor of interest may be selected. When the nomenclature of an olfactory receptor of an organism species is different from the nomenclature in the organism species from which the olfactory receptor of interest is derived, a gene having high homology, preferably a gene having the highest homology, to the gene of the olfactory receptor of interest in the organism species may be selected as an ortholog. Alternatively, a gene known to be an ortholog of the gene of the olfactory receptor of interest in the organism species may be selected.

[0104] The number of types of the olfactory receptors (a) is at least 11 types, preferably at least 15 types, in terms of the number of receptors. On the other hand, the upper limit of the number of types is the number of all types of orthologs in organism species in the same order as that of an organism species from which the olfactory receptor of interest is derived. The number of types is preferably 500 or less types, more preferably 250 or less types, further more preferably 100 or less types, further more preferably 50 or less types, in terms of the number of receptors. The number of types of the olfactory receptors (a) can be, for example, from 11 types to all types of orthologs in organism species in the same order as that of an organism species from which the olfactory receptor of interest is derived, from 11 to 500 types, from 11 to 250 types, from 11 to 100 types, from 11 to 50 types, or from 15 to 50 types, in terms of the number of receptors.

[0105] In the expression method of the present invention, the olfactory receptors (b) are olfactory receptors encoded by orthologs of the olfactory receptor of interest in the same order as that of an organism species from which the olfactory receptor of interest is derived and olfactory receptors encoded by paralogs of the olfactory receptor of interest. The orthologs are not particularly limited and are preferably orthologs having higher homology to the gene of the olfactory receptor of interest. The paralogs are not particularly limited and are preferably paralogs having high homology, more preferably paralogs having the highest homology, to the gene of the olfactory receptor of interest.

[0106] In a preferred example of the present embodiment, the orthologs of the olfactory receptor of interest in the same order as that of an organism species from which the olfactory receptor of interest is derived in (b) are genes involving the same name as that of the gene of the olfactory receptor of interest among olfactory receptor genes of organism species belonging to the order. The orthologs can be selected in the same manner as in the case of (a) described above.

[0107] In a more preferred example of the present embodiment, the orthologs of the olfactory receptor of interest in the same order as that of an organism species from which the olfactory receptor of interest is derived in (b) are olfactory receptor genes of organism species belonging to the order and are genes suggested to have the possibility that the genes diverged after a specification event by phylogenetic tree analysis among the genes involving the same name as that of the gene of the olfactory receptor of interest. The orthologs can be selected in the same manner as in the case of (a) described above.

[0108] In a preferred example of the present embodiment, the paralogs of the olfactory receptor of interest in (b) are genes having high homology to the gene of the olfactory receptor of interest among olfactory receptor genes of the organism species from which the olfactory receptor of interest is derived. The paralogs can be selected from a homologous gene group (e.g., top 500 genes, preferably top 250 genes, more preferably top 100 genes, further more preferably top 50 genes) obtained as a result of performing database search with NCBI BLAST or the like by setting the amino acid sequence of the olfactory receptor of interest to a query sequence and an organism name to be searched to the organism species from which the olfactory receptor of interest is derived.

[0109] Alternatively, the orthologs of the olfactory receptor of interest in the same order as that of an organism species from which the olfactory receptor of interest is derived and the paralogs of the olfactory receptor of interest in (b) can also be selected by, for example, the following procedures: database search is performed with NCBI BLAST or the like by setting the amino acid sequence of the olfactory receptor of interest to a query sequence and an organism name to be searched to the same order as that of an organism species from which the olfactory receptor of interest is derived. A phylogenetic tree is prepared by an approach known in the art using the resulting homologous gene group (e.g., top 500 genes, preferably top 250 genes, more preferably top 100 genes, further more preferably top 50 genes). A clade is identified which includes as many genes involving the same name as that of the gene of the olfactory receptor of interest as possible and as few other genes as possible. A clade is identified which is adjacent to the identified clade and includes a gene, having the highest homology to the gene of the olfactory receptor of interest, in the organism species from which the olfactory receptor of interest is derived. Genes included in the identified clade group are selected. In this respect, when the clade group includes a gene ranked below top 50 of the homologous gene group of organism species in the same order as that of an organism species from which the olfactory receptor of interest is derived, it is preferred to exclude the gene.

[0110] The number of types of the olfactory receptors (b) is at least 11 types, preferably at least 25 types, more preferably at least 35 types, in terms of the number of receptors. On the other hand, the upper limit of the number of types is the number of all types of orthologs in organism species in the same order as that of an organism species from which the olfactory receptor of interest is derived and paralogs of the olfactory receptor of interest. The number of types is preferably 500 or less types, more preferably 250 or less types, further more preferably 100 or less types, further more preferably 50 or less types, in terms of the number of receptors. The number of types of the olfactory receptors (b) can be, for example, from 11 types to all types of orthologs in organism species in the same order as that of an organism species from which the olfactory receptor of interest is derived and paralogs of the olfactory receptor of interest, from 11 to 500 types, from 11 to 250 types, from 11 to 100 types, from 11 to 50 types, from 25 to 50 types, or from 35 to 50 types, in terms of the number of receptors. Among them, the number of types of olfactory receptors encoded by paralogs of the olfactory receptor of interest is at least one type in terms of the number of receptors. On the other hand, the upper limit of the number of types is the number of all types of paralogs of the olfactory receptor of interest. The number of types is preferably 50 or less types, more preferably 10 or less types, in terms of the number of receptors. The number of types of olfactory receptors encoded by paralogs of the olfactory receptor of interest can be, for example, from one type to all types of paralogs of the olfactory receptor of interest, from 1 to 50 types, or from 1 to 10 types, in terms of the number of receptors. The olfactory receptors encoded by paralogs are more preferably one member having the highest homology to the gene of the olfactory receptor of interest.

[0111] When the olfactory receptor of interest is, for example, a human olfactory receptor, the “same order as that of an organism species from which the olfactory receptor of interest is derived” in (a) or (b) refers to the order Primates of the class Mammalia of the phylum Vertebrata. Organism species belonging to the order Primates are called primates and are known as approximately 220 now-existing species. Examples of the primates include, but are not limited to, humans, chimpanzees, bonobos, gorillas, Sumatran orangutans, northern white-cheeked gibbons, drills, gelada baboons, rhesus macaques, olive baboons, sooty mangabeys, green monkeys, ashy red colobuses, Angola colobuses, Garnett's greater galagoes, gray mouse lemurs, Coquerel's sifakas, and Philippine tarsiers. When the olfactory receptor of interest is a human olfactory receptor, the “genes involving the same name as that of the gene of the olfactory receptor of interest” refer to genes involving the same family name, subfamily name, and member name as those of the gene of the human olfactory receptor of interest.

[0112] In the expression method of the present invention, the olfactory receptors (c) are olfactory receptors encoded by orthologs of the olfactory receptor of interest in vertebrates and include at least one olfactory receptor encoded by a vertebrate ortholog in an order different from the order of an organism species from which the olfactory receptor of interest is derived. The olfactory receptors encoded by orthologs of the olfactory receptor of interest in vertebrates are preferably olfactory receptors selected from the group consisting of olfactory receptors encoded by orthologs of the olfactory receptor of interest in mammals, Aves, Reptilia, Amphibia, and fish, more preferably olfactory receptors selected from the group consisting of olfactory receptors encoded by orthologs of the olfactory receptor of interest in mammals, Aves, Reptilia, and Amphibia, further more preferably olfactory receptors encoded by orthologs of the olfactory receptor of interest in mammals. The order different from that of an organism species from which the olfactory receptor of interest is derived may be orders other than the order to which the organism species belongs, and a classification system higher than the order may be the same as or different from that of the organism species. The orthologs are not particularly limited and are preferably orthologs having higher homology to the gene of the olfactory receptor of interest. In this context, the mammals refer to organism species belonging to the class Mammalia of the phylum Vertebrata and are known as approximately 5500 now-existing species also including the primates described above. Examples of the mammals other than the primates described above include, but are not limited to, mice, rats, rabbits, cats, dogs, foxes, raccoon dogs, weasels, tigers, cheetahs, bears, sea lions, earless seals, sea bears, horses, rhinos, camels, pigs, hogs, bovines, goats, sheep, deer, giraffes, hippopotamuses, elephants, pangolins, moles, and bats. The Aves refers to organism species belonging to the class Aves of the phylum Vertebrata. Examples of the Aves include, but are not limited to, chickens, dabblers, ducks, gooses, turkeys, ostriches, pheasants, doves, parrots, canary-birds, society finches, hummingbirds, manakins, quails, and flycatchers. The Reptilia refers to organism species belonging to the class Reptilia of the phylum Vertebrata. Examples of the Reptilia include, but are not limited to, tortoises, lizards, gators, iguanas, chameleons, geckos, and snakes. The Amphibia refers to organism species belonging to the class Amphibia of the phylum Vertebrata. Examples of the Amphibia include, but are not limited to, frogs, newts, and salamanders. The fish collectively refers to organism species belonging to the class Myxini, the order Petromyzontiformes, the class Chondrichthyes, and the class Osteichthyes of the phylum Vertebrata. Examples of the fish include, but are not limited to, hagfishes, lampreys, sharks, rays, tunas, bonitos, salmons, trout, cods, porgies, flounders, amberjacks, horse mackerels, and mackerels.

[0113] In a preferred example of the present embodiment, the orthologs of the olfactory receptor of interest in vertebrates in (c) are genes involving the same name as that of the gene of the olfactory receptor of interest among olfactory receptor genes of organism species belonging to the vertebrates. The orthologs can be selected by, for example, the following procedures: database search is performed with NCBI BLAST or the like by setting the amino acid sequence of the olfactory receptor of interest to a query sequence. The genes involving the same name as that of the gene of the olfactory receptor of interest are selected from the resulting homologous gene group (e.g., top 500 genes, preferably top 250 genes, more preferably top 100 genes, further more preferably top 50 genes).

[0114] When a plurality of genes derived from the same organism species are selected as orthologs, only one gene having the highest homology to the gene of the olfactory receptor of interest may be selected. For example, when the olfactory receptor of interest is a human olfactory receptor and a plurality of genes of a non-human organism species are selected as orthologs, a gene of the organism species having the highest homology to the gene of the human olfactory receptor of interest may be selected. When the nomenclature of an olfactory receptor of an organism species is different from the nomenclature in the organism species from which the olfactory receptor of interest is derived, a gene having high homology, preferably a gene having the highest homology, to the gene of the olfactory receptor of interest in the organism species may be selected as an ortholog. Alternatively, a gene known to be an ortholog of the gene of the olfactory receptor of interest in the organism species may be selected.

[0115] The number of types of the olfactory receptors (c) is at least 11 types, preferably at least 15 types, more preferably at least 30 types, in terms of the number of receptors. On the other hand, the upper limit of the number of types is the number of all types of orthologs of the olfactory receptor of interest in vertebrates. The number of types is preferably 500 or less types, more preferably 400 or less types, further more preferably 300 or less types, in terms of the number of receptors. The number of types of the olfactory receptors (c) can be, for example, from 11 types to all types of orthologs of the olfactory receptor of interest in vertebrates, from 11 to 500 types, from 11 to 400 types, from 11 to 300 types, from 15 to 300 types, or from 30 to 300 types, in terms of the number of receptors. Among them, the number of types of olfactory receptors encoded by vertebrate orthologs of orders different from that of an organism species from which the olfactory receptor of interest is derived is at least one type, preferably 5 types, more preferably 10 types, in terms of the number of receptors. On the other hand, the upper limit of the number of types of is the number of all types of vertebrate orthologs of orders different from that of an organism species from which the olfactory receptor of interest is derived. The number of types is preferably 250 or less types, more preferably 100 or less types, further more preferably 50 or less types. The number of types of olfactory receptors encoded by vertebrate orthologs of orders different from that of an organism species from which the olfactory receptor of interest is derived can be, for example, from one type to all types of vertebrate orthologs of orders different from that of an organism species from which the olfactory receptor of interest is derived, from 1 to 250 types, from 5 to 250 types, from 10 to 250 types, from 10 to 100 types, or from 10 to 50 types, in terms of the number of receptors.

[0116] In the expression method of the present invention, the olfactory receptors (d) are olfactory receptors selected from the group consisting of olfactory receptors encoded by orthologs of the olfactory receptor of interest in vertebrates, and olfactory receptors encoded by orthologs in a vertebrate with a paralog having the highest homology to the olfactory receptor of interest among paralogs of the olfactory receptor of interest having 11 or more vertebrate orthologs, and are olfactory receptors including at least one olfactory receptor encoded by a vertebrate ortholog in an order different from the order of an organism species from which the olfactory receptor of interest is derived, and an olfactory receptor encoded by the paralog. The olfactory receptors encoded by orthologs of the olfactory receptor of interest in vertebrates are preferably olfactory receptors selected from the group consisting of olfactory receptors encoded by orthologs of the olfactory receptor of interest in mammals, Aves, Reptilia, Amphibia, and fish, more preferably olfactory receptors selected from the group consisting of olfactory receptors encoded by orthologs of the olfactory receptor of interest in mammals, Aves, Reptilia, and Amphibia, further more preferably olfactory receptors encoded by orthologs of the olfactory receptor of interest in mammals. The orders different from that of an organism species from which the olfactory receptor of interest is derived may be orders other than the order to which the organism species belongs, and a classification system higher than the order may be the same as or different from that of the organism species. The orthologs are not particularly limited and are preferably orthologs having higher homology to the gene of the olfactory receptor of interest. The orthologs in a vertebrate with a paralog are not particularly limited and are preferably orthologs having higher homology to the paralog. In this context, examples of the mammals, the Aves, the Reptilia, the Amphibia, and the fish can include the same organism species as in the case of (c) described above.

[0117] In a preferred example of the present embodiment, the orthologs of the olfactory receptor of interest in vertebrates in (d) are genes involving the same name as that of the gene of the olfactory receptor of interest among olfactory receptor genes of organism species belonging to the vertebrates. The orthologs can be selected in the same manner as in the case of (c) described above. If any ortholog of the olfactory receptor of interest cannot be selected in vertebrates, the olfactory receptors (d) can be olfactory receptors encoded by orthologs in a vertebrate with a paralog having the highest homology to the olfactory receptor of interest among paralogs of the olfactory receptor of interest having 11 or more vertebrate orthologs, and be olfactory receptors including at least one olfactory receptor encoded by a vertebrate ortholog in an order different from the order of an organism species from which the olfactory receptor of interest is derived, and an olfactory receptor encoded by the paralog. The orthologs in a vertebrate with a paralog having the highest homology to the olfactory receptor of interest among paralogs of the olfactory receptor of interest having 11 or more vertebrate orthologs in (d) are preferably olfactory receptor genes of organism species belonging to the vertebrate, are genes involving the same name as that of the paralog having the highest homology to the gene of the olfactory receptor of interest among paralogs of the olfactory receptor of interest having 11 or more vertebrate orthologs, and are selected from the group consisting of paralogs having high homology to the gene of the olfactory receptor of interest. The orthologs can be selected by, for example, the following procedures: database search is performed with NCBI BLAST or the like by setting the amino acid sequence of the olfactory receptor of interest to a query sequence. The paralog having the highest homology to the gene of the olfactory receptor of interest is selected from the resulting homologous gene group (e.g., top 500 genes, preferably top 250 genes, more preferably top 100 genes, further more preferably top 50 genes). Subsequently, genes involving the same name as that of the paralog are selected. When the selected genes are less than 11 genes, a paralog having the second highest homology to the gene of the olfactory receptor of interest is selected and genes involving the same name as that of the paralog are selected in the same manner as above. Finally, this procedure can be repeated until 11 or more genes are selected.

[0118] When a plurality of genes derived from the same organism species are selected as orthologs, only one gene having the highest homology to the gene of the olfactory receptor of interest may be selected. For example, when the olfactory receptor of interest is a human olfactory receptor and a plurality of genes of a non-human organism species are selected as orthologs, a gene of the organism species having the highest homology to the gene of the human olfactory receptor of interest may be selected. When the nomenclature of an olfactory receptor of an organism species is different from the nomenclature in the organism species from which the olfactory receptor of interest is derived, a gene having high homology, preferably a gene having the highest homology, to the gene of the olfactory receptor of interest in the organism species may be selected as an ortholog. Alternatively, a gene known to be an ortholog of the gene of the olfactory receptor of interest in the organism species may be selected.

[0119] The number of types of the olfactory receptors (d) is at least 11 types, preferably at least 30 types, more preferably at least 60 types, in terms of the number of receptors. On the other hand, the upper limit of the number of types is the number of all types of orthologs of the olfactory receptor of interest in vertebrates, and orthologs in a vertebrate with a paralog having the highest homology to the olfactory receptor of interest among paralogs of the olfactory receptor of interest having 11 or more vertebrate orthologs. The number of types is preferably 500 or less types, more preferably 400 or less types, further more preferably 300 or less types, in terms of the number of receptors. The number of types of the olfactory receptors (d) can be, for example, from 11 types to all types of orthologs of the olfactory receptor of interest in vertebrates, and orthologs in a vertebrate with a paralog having the highest homology to the olfactory receptor of interest among paralogs of the olfactory receptor of interest having 11 or more vertebrate orthologs, from 11 to 500 types, from 11 to 400 types, from 11 to 300 types, from 30 to 300 types, or from 60 to 300 types, in terms of the number of receptors. Among them, the number of types of olfactory receptors encoded by vertebrate orthologs in orders different from that of an organism species from which the olfactory receptor of interest is derived is at least one type, preferably 5 types, more preferably 10 types, in terms of the number of receptors. On the other hand, the upper limit of the number of types is the number of all types of vertebrate orthologs in orders different from that of an organism species from which the olfactory receptor of interest is derived. The number of types is preferably 250 or less types, more preferably 100 or less types, further more preferably 50 or less types. The number of types of olfactory receptors encoded by vertebrate orthologs in orders different from that of an organism species from which the olfactory receptor of interest is derived can be, for example, from one type to all types of vertebrate orthologs in orders different from that of an organism species from which the olfactory receptor of interest is derived, from 1 to 250 types, from 5 to 250 types, from 10 to 250 types, from 10 to 100 types, or from 10 to 50 types, in terms of the number of receptors.

[0120] Among the olfactory receptors (a) to (d), the olfactory receptors (c) are preferably used in consensus design because consensus based on olfactory receptor genes of more species can be reflected in the consensus design of the olfactory receptor of interest. If the olfactory receptors (c) cannot be used in the consensus design of the olfactory receptor of interest, in other words, if only less than 11 types of orthologs of the olfactory receptor of interest are identified, the olfactory receptors (d) can be suitably used in the consensus design.

[0121] In the expression method of the present invention, the “consensus amino acid sequence” is an amino acid sequence derived by alignment of the amino acid sequence of the olfactory receptor of interest and the amino acid sequences of any of the olfactory receptors (a) to (d). Specifically, the “consensus amino acid sequence” is an amino acid sequence consisting of consensus residues identified in accordance with the following criteria (i) to (iii) from the alignment of the amino acid sequence of the olfactory receptor of interest and the amino acid sequences of any of the olfactory receptors (a) to (d):
[0122] (i) at each amino acid position of the alignment,
   [0123] (i-i) when there exists one amino acid residue which is different from the amino acid residue of the olfactory receptor of interest and has a frequency of appearance of 50% or more, the amino acid residue is identified as a consensus residue,
   [0124] (i-ii) when there exist two amino acid residues having a frequency of appearance of 50%, the amino acid residues of the olfactory receptor of interest are identified as a consensus residue,
   [0125] (i-iii) when there exists an amino acid residue in the olfactory receptor of interest and there exists no amino acid residue having a frequency of appearance of 40% or more, the absence of a consensus residue is identified,
   [0126] (i-iv) when there exists no amino acid residue in the olfactory receptor of interest and there exists an amino acid residue having a frequency of appearance of 60% or more, an amino acid residue having the highest frequency of appearance is identified as a consensus residue, and when there exist two or more amino acid residues having the highest frequency of appearance, an amino acid residue having the smallest molecular weight among the amino acid residues is identified as a consensus residue, and
   [0127] (i-v) if none of the above (i-i) to (i-iv) is appropriate, the amino acid residue of the olfactory receptor of interest is identified as a consensus residue;
[0128] (ii) when the consensus residues are identified in accordance with the criterion (i) and when a consensus residue nearest to the N terminus is a consensus residue at a position corresponding to the N terminus of the olfactory receptor of interest or a C-terminal side thereof and is not a methionine residue, a consensus residue on an N-terminal side of a consensus residue consisting of a methionine residue positioned nearest to the N terminus is changed to the absence of a consensus residue; and
[0129] (iii) when the consensus residues are identified in accordance with the criterion (i) and when a consensus residue nearest to the N terminus is a consensus residue at a position corresponding to an N-terminal side of the N terminus of the olfactory receptor of interest and is not a methionine residue, an amino acid residue having the highest frequency of appearance is identified as a consensus residue by tracing back one by one amino acid positions on an N-terminal side of the position of the consensus residue of the alignment until a methionine residue appears, and when there exist two or more amino acid residues having the highest frequency of appearance, an amino acid residue having the smallest molecular weight among the amino acid residues is identified as a consensus residue.

[0130] In this context, the “frequency of appearance” refers to a percentage of the number of particular amino acid residues appearing at each amino acid position in the alignment of amino acid sequences with respect to the number of amino acid sequences subjected to the alignment. The alignment of amino acid sequences can be carried out with an algorithm known in the art.

[0131] The criterion (i), (i-i) is a criterion in the case where there exists an amino acid residue in the olfactory receptor of interest at an amino acid position in the alignment of the amino acid sequence of the olfactory receptor of interest and the amino acid sequences of any of the olfactory receptors (a) to (d). In this respect, provided that there exists one amino acid residue which is different from the amino acid residue of the olfactory receptor of interest and has a frequency of appearance of 50% or more, the amino acid residue having a frequency of appearance of 50% or more is identified as a consensus residue at the position. On the other hand, provided that all amino acid residues other than the amino acid residue of the olfactory receptor of interest have a frequency of appearance of less than 50%, the amino acid residue of the olfactory receptor of interest is identified as a consensus residue at the position in accordance with the criterion (i-v).

[0132] The criterion (i), (i-ii) is a criterion in the case where there exists an amino acid residue in the olfactory receptor of interest at an amino acid position in the alignment of the amino acid sequence of the olfactory receptor of interest and the amino acid sequences of any of the olfactory receptors (a) to (d). In this respect, provided that there exist two amino acid residues having a frequency of appearance of 50%, one of the two amino acid residues is inevitably the amino acid residue of the olfactory receptor of interest and the amino acid residue of the olfactory receptor of interest is identified as a consensus residue at the position.

[0133] The criterion (i), (i-iii) is a criterion in the case where there exists an amino acid residue in the olfactory receptor of interest at an amino acid position in the alignment of the amino acid sequence of the olfactory receptor of interest and the amino acid sequences of any of the olfactory receptors (a) to (d). In this respect, provided that there exists no amino acid residue having a frequency of appearance of 40% or more, the absence of a consensus residue is identified at the position. On the other hand, provided that the frequency of appearance in the absence of an amino acid residue is less than 40%, a consensus residue at the position is identified in accordance with the criterion (i-i) when the criterion (i-i) is appropriate, while the amino acid residue of the olfactory receptor of interest is identified as a consensus residue at the position in accordance with the criterion (i-v) when the criterion (i-i) is not appropriate.

[0134] The criterion (i), (i-iv) is a criterion in the case where there exists no amino acid residue in the olfactory receptor of interest at an amino acid position in the alignment of the amino acid sequence of the olfactory receptor of interest and the amino acid sequences of any of the olfactory receptors (a) to (d). In this respect, provided that there exists an amino acid residue having a frequency of appearance of 60% or more, an amino acid residue having the highest frequency of appearance is identified as a consensus residue at the position, and when there exist two or more amino acid residues having the highest frequency of appearance, an amino acid residue having the smallest molecular weight among the amino acids having the highest frequency of appearance is identified as a consensus residue. For example, provided that one amino acid residue has the highest frequency of appearance, the one amino acid residue is identified as a consensus residue at the position. Provided that two or more amino acid residues have the highest frequency of appearance, an amino acid residue having the smallest molecular weight thereamong can be identified as a consensus residue at the position. If the change extends the full-length of the consensus amino acid sequence by 10% or more on an N-terminal side from the full-length of the amino acid sequence of the olfactory receptor of interest, a consensus residue at a position corresponding to the N terminus of the olfactory receptor of interest may be set to a methionine residue and a consensus residue on an N-terminal side of the methionine residue may be changed to the absence, in the consensus amino acid sequence from the viewpoint of structural maintenance of the olfactory receptor. Specifically, an N-terminal structure of the olfactory receptor of interest may be maintained as it is. On the other hand, provided that the frequency of appearance in the presence of an amino acid residue is less than 60%, the amino acid residue of the olfactory receptor of interest is identified as a consensus residue at the position in accordance with the criterion (i-v). Specifically, the absence of an amino acid residue is identified at the position.

[0135] If none of the above (i), (i-i) to (i-iv) is appropriate for an amino acid position in the alignment of the amino acid sequence of the olfactory receptor of interest and the amino acid sequences of any of the olfactory receptors (a) to (d), the amino acid residue of the olfactory receptor of interest is identified as a consensus residue at the position. In this respect, provided that there exists no amino acid residue in the olfactory receptor of interest, the absence of an amino acid residue can be identified at the position of the consensus amino acid sequence.

[0136] The criterion (ii) is a criterion in the case where when the consensus residue is identified at each amino acid position in the alignment of the amino acid sequence of the olfactory receptor of interest and the amino acid sequences of any of the olfactory receptors (a) to (d) in accordance with the criterion (i), a consensus residue positioned nearest to the N terminus among the consensus residues is a consensus residue at a position corresponding to the N terminus of the olfactory receptor of interest or a C-terminal side thereof and is not a methionine residue. In this respect, a consensus residue on an N-terminal side of a consensus residue consisting of a methionine residue positioned nearest to the N terminus among the consensus residues is changed to the absence of a consensus residue such that an N-terminal consensus residue is a methionine residue, in other words, such that a translation initiation amino acid of the olfactory receptor polypeptide is a methionine residue. For example, the consensus residues are checked one by one from the N terminus, and the absence of a consensus residue is identified at a position having no methionine residue. This operation can be repeated until a methionine residue appears for the first time. If the change shortens the full-length of the consensus amino acid sequence by 10% or more from the full-length of the amino acid sequence of the olfactory receptor of interest, a consensus residue nearest to the N terminus among the consensus residues before the change may be changed to a consensus residue consisting of a methionine residue from the viewpoint of structural maintenance of the helix of the olfactory receptor. In this respect, provided that the consensus residue nearest to the N terminus among the consensus residues before the change is asparagine, serine, or threonine involved in sugar chain modification and/or membrane translocation, an amino acid residue of the olfactory receptor of interest on an N-terminal side of a position corresponding to the consensus residue may be used as a consensus residue without changing the consensus residue nearest to the N terminus among the consensus residues before the change from the viewpoint of structural maintenance of the olfactory receptor. Specifically, an N-terminal structure of the olfactory receptor of interest may be maintained as it is.

[0137] The criterion (iii) is a criterion in the case where when the consensus residue is identified at each amino acid position in the alignment of the amino acid sequence of the olfactory receptor of interest and the amino acid sequences of any of the olfactory receptors (a) to (d) in accordance with the criterion (i), a consensus residue nearest to the N terminus is a consensus residue at a position corresponding to an N-terminal side of the N terminus of the olfactory receptor of interest and is not a methionine residue. In this respect, the alignment is checked by tracing back one by one amino acid positions on an N-terminal side of the position of a consensus residue nearest to the N terminus until a methionine residue appears such that an N-terminal consensus residue is a methionine residue, in other words, such that a translation initiation amino acid of the olfactory receptor polypeptide is a methionine residue. An amino acid residue having the highest frequency of appearance is identified as a consensus residue. When there exist two or more amino acid residues having the highest frequency of appearance, an amino acid residue having the smallest molecular weight among the amino acid residues is identified as a consensus residue.

[0138] An amino acid sequence consisting of the consensus residues thus identified is the consensus amino acid sequence. The olfactory receptor polypeptide used in the present invention is an altered olfactory receptor polypeptide consisting of an amino acid sequence obtained by, in an amino acid sequence of an olfactory receptor of interest, altering at least one amino acid residue different from that in a consensus amino acid sequence to an amino acid residue at a position corresponding thereto in the consensus amino acid sequence. In this context, the term “altering” conceptually includes all of substitution, deletion, addition, and insertion. The difference between the amino acid sequence of the olfactory receptor of interest and the consensus amino acid sequence can be found, for example, by aligning the amino acid sequences and comparing both the amino acid sequences using an algorithm known in the art. For example, provided that an amino acid residue at an amino acid position in the amino acid sequence of the olfactory receptor of interest is an amino acid residue different from an amino acid residue at a position corresponding thereto in the consensus amino acid sequence when the amino acid sequence of the olfactory receptor of interest is compared with the consensus amino acid sequence, the amino acid residue of the olfactory receptor of interest can be substituted by the amino acid residue of the consensus amino acid sequence. Alternatively, provided that an amino acid residue at a position corresponding to an amino acid position in the amino acid sequence of the olfactory receptor of interest is absent in the consensus amino acid sequence when the amino acid sequence of the olfactory receptor of interest is compared with the consensus amino acid sequence, an amino acid residue at the amino acid position of the olfactory receptor of interest can be deleted. Alternatively, provided that an amino acid residue at a position corresponding to a position having no amino acid residue in the amino acid sequence of the olfactory receptor of interest is present in the consensus amino acid sequence when the amino acid sequence of the olfactory receptor of interest is compared with the consensus amino acid sequence, the amino acid residue of the consensus amino acid sequence can be inserted to the amino acid position of the olfactory receptor of interest. Provided that the consensus amino acid sequence is longer at the N terminus than the amino acid sequence of the olfactory receptor of interest when the amino acid sequence of the olfactory receptor of interest is compared with the consensus amino acid sequence, an N-terminal moiety present only in the consensus amino acid sequence can be added to the N terminus of the amino acid sequence of the olfactory receptor of interest. Alternatively, provided that the consensus amino acid sequence is longer at the C terminus than the amino acid sequence of the olfactory receptor of interest when the amino acid sequence of the olfactory receptor of interest is compared with the consensus amino acid sequence, a C-terminal moiety present only in the consensus amino acid sequence can be added to the C terminus of the amino acid sequence of the olfactory receptor of interest.

[0139] When the consensus amino acid sequence is a sequence derived from the olfactory receptor of interest and the olfactory receptors (a), the number of amino acid residues to be altered in the amino acid sequence of the olfactory receptor of interest is at least 1, preferably at least 3, more preferably at least 5. Further more preferably, all amino acid residues different from those of the consensus amino acid sequence in the amino acid sequence of the olfactory receptor of interest are altered to the amino acid residues of the consensus amino acid sequence at positions corresponding thereto (i.e., the amino acid sequence of the olfactory receptor of interest is altered to the consensus amino acid sequence). When the consensus amino acid sequence is a sequence derived from the olfactory receptor of interest and the olfactory receptors (b), the number of amino acid residues to be altered in the amino acid sequence of the olfactory receptor of interest is at least 1, preferably at least 3, more preferably at least 5. Further more preferably, all amino acid residues different from those in the consensus amino acid sequence in the amino acid sequence of the olfactory receptor of interest are altered to the amino acid residues at positions corresponding thereto in the consensus amino acid sequence (i.e., the amino acid sequence of the olfactory receptor of interest is altered to the consensus amino acid sequence). When the consensus amino acid sequence is a sequence derived from the olfactory receptor of interest and the olfactory receptors (c), the number of amino acid residues to be altered in the amino acid sequence of the olfactory receptor of interest is at least 1, preferably at least 5, more preferably at least 10. Further more preferably, all amino acid residues different from those in the consensus amino acid sequence in the amino acid sequence of the olfactory receptor of interest are altered to the amino acid residues at positions corresponding thereto in the consensus amino acid sequence (i.e., the amino acid sequence of the olfactory receptor of interest is altered to the consensus amino acid sequence). When the consensus amino acid sequence is a sequence derived from the olfactory receptor of interest and the olfactory receptors (d), the number of amino acid residues to be altered in the amino acid sequence of the olfactory receptor of interest is at least 1, preferably at least 5, more preferably at least 10. Further more preferably, all amino acid residues different from those in the consensus amino acid sequence in the amino acid sequence of the olfactory receptor of interest are altered to the amino acid residues at positions corresponding thereto in the consensus amino acid sequence (i.e., the amino acid sequence of the olfactory receptor of interest is altered to the consensus amino acid sequence).

[0140] Alternatively, the number of amino acid residues to be altered in the amino acid sequence of the olfactory receptor of interest can be the number of preferably at least 10%, more preferably at least 30%, further more preferably at least 50%, further more preferably at least 70%, further more preferably at least 90%, further more preferably 100% of the number of amino acid residues different from those in the consensus amino acid sequence (i.e., the amino acid sequence of the olfactory receptor of interest is altered to the consensus amino acid sequence).

[0141] Provided that the consensus amino acid sequence is longer at the N terminus than the amino acid sequence of the olfactory receptor of interest, it is preferred to perform the alteration by integrally adding an N-terminal moiety present only in the consensus amino acid sequence to the N terminus of the amino acid sequence of the olfactory receptor of interest, irrespective of the number of amino acid residues. Provided that the consensus amino acid sequence is shorter at the N terminus than the amino acid sequence of the olfactory receptor of interest, it is preferred to perform the alteration by integrally deleting an N-terminal moiety present only in the amino acid sequence of the olfactory receptor of interest from the N terminus of the amino acid sequence of the olfactory receptor of interest, irrespective of the number of amino acid residues. Provided that the consensus amino acid sequence is longer at the C terminus than the amino acid sequence of the olfactory receptor of interest, it is preferred to perform the alteration by integrally adding a C-terminal moiety present only in the consensus amino acid sequence to the C terminus of the amino acid sequence of the olfactory receptor of interest, irrespective of the number of amino acid residues. Provided that the consensus amino acid sequence is shorter at the C terminus than the amino acid sequence of the olfactory receptor of interest, it is preferred to perform the alteration by integrally deleting a C-terminal moiety present only in the amino acid sequence of the olfactory receptor of interest from the C terminus of the amino acid sequence of the olfactory receptor of interest, irrespective of the number of amino acid residues.

[0142] As the olfactory receptor polypeptide used in the present invention, a polypeptide containing substitution, deletion, addition, or insertion of one to several (e.g., 1 to 10, 1 to 5, or 1 to 3) amino acid residues at amino acid positions other than the amino acid position to be altered on the basis of the consensus amino acid sequence described above is also included in the present invention without impairing its functions.

[0143] In a preferred example of the present embodiment, the olfactory receptor polypeptide consists of an amino acid sequence obtained by, in an amino acid sequence of sequence identification number (2) of an olfactory receptor (1) in Tables 1-1 to 1-5 given below, altering at least one amino acid residue different from that in a consensus amino acid sequence of sequence identification number (3) to an amino acid residue at a position corresponding thereto in the consensus amino acid sequence. More preferably, the olfactory receptor polypeptide consists of a consensus amino acid sequence of sequence identification number (3) in Tables 1-1 to 1-5 given below. Further more preferably, the olfactory receptor polypeptide consists of an amino acid sequence of any of SEQ ID NOs: 99 to 104, 109 to 118, 121, 123, 125 to 130, 133, 136, 138, 140 to 146, 149 to 210, 485 to 642, and 851 to 900. The olfactory receptor polypeptide consisting of an amino acid sequence of any of SEQ ID NOs: 97 to 107, 109 to 121, 123, 125 to 133, 135 to 210, 485 to 639, 641, 642, and 851 to 900 is highly improved in membrane expression in comparison with the original olfactory receptor. In Tables 1-1 to 1-5, the olfactory receptors (1) of Nos. 1 to 270 and 272 to 322 are human olfactory receptors, and the olfactory receptor (1) of No. 271 is a mouse olfactory receptor. Accession No. represents GenBank Accession No.

TABLE 1-1

| | | | | (3) SEQ ID NO |
|---|---|---|---|---|
| | (1) | | (2) SEQ ID NO | of consensus |
| | Olfactory | | of amino acid | amino acid |
| No. | receptor | Accession No. | sequence | sequence |
| 1 | OR2A25 | NP_001004488.1 | 1 | 97 |
| 2 | OR2A25 | NP_001004488.1 | 1 | 98 |
| 3 | OR2A25 | NP_001004488.1 | 1 | 99 |
| 4 | OR2AG1 | NP_001004489.1 | 2 | 100 |
| 5 | OR2AG2 | NP_001004490.1 | 3 | 101 |
| 6 | OR2D2 | ALI87480.1 | 4 | 102 |
| 7 | OR2D3 | NP_001004684.1 | 5 | 103 |
| 8 | OR2T11 | NP_001001964.1 | 6 | 104 |
| 9 | OR2T11 | NP_001001964.1 | 6 | 105 |
| 10 | OR2T11 | NP_001001964.1 | 6 | 106 |
| 11 | OR2W1 | NP_112165.1 | 7 | 107 |
| 12 | OR2W1 | NP_112165.1 | 7 | 108 |
| 13 | OR2W1 | NP_112165.1 | 7 | 109 |
| 14 | OR2W3 | NP_001001957.2 | 8 | 110 |
| 15 | OR2Y1 | NP_001001657.1 | 9 | 111 |
| 16 | OR3A2 | NP_002542.3 | 10 | 112 |
| 17 | OR4A16 | NP_001005274.1 | 11 | 113 |
| 18 | OR4C15 | NP_001001920.2 | 12 | 114 |
| 19 | OR4D5 | NP_001001965.1 | 13 | 115 |
| 20 | OR4D6 | NP_001004708.1 | 14 | 116 |
| 21 | OR4F15 | NP_001001674.1 | 15 | 117 |
| 22 | OR4K15 | NP_001005486.1 | 16 | 118 |
| 23 | OR4Q3 | NP_751944.1 | 17 | 119 |
| 24 | OR4Q3 | NP_751944.1 | 17 | 120 |
| 25 | OR4Q3 | NP_751944.1 | 17 | 121 |
| 26 | OR4S2 | NP_001004059.2 | 18 | 122 |
| 27 | OR4S2 | NP_001004059.2 | 18 | 123 |
| 28 | OR4S2 | NP_001004059.2 | 18 | 124 |
| 29 | OR5A2 | NP_001001954.1 | 19 | 125 |
| 30 | OR5C1 | NP_001001923.1 | 20 | 126 |
| 31 | OR5W2 | NP_001001960.1 | 21 | 127 |
| 32 | OR6A2 | NP_003687.2 | 22 | 128 |
| 33 | OR6B2 | NP_001005853.1 | 23 | 129 |
| 34 | OR6C1 | NP_001005182.1 | 24 | 130 |
| 35 | OR6Y1 | NP_001005189.1 | 25 | 131 |
| 36 | OR6Y1 | NP_001005189.1 | 25 | 132 |
| 37 | OR6Y1 | NP_001005189.1 | 25 | 133 |
| 38 | OR7A17 | NP_112163.1 | 26 | 134 |
| 39 | OR7A17 | NP_112163.1 | 26 | 135 |
| 40 | OR7A17 | NP_112163.1 | 26 | 136 |
| 41 | OR7D4 | NP_001005191.1 | 27 | 137 |
| 42 | OR7D4 | NP_001005191.1 | 27 | 138 |
| 43 | OR7D4 | NP_001005191.1 | 27 | 139 |
| 44 | OR10A2 | NP_001004460.1 | 28 | 140 |
| 45 | OR10A4 | ALI87721.1 | 29 | 141 |
| 46 | OR10D3 | NP_001342142.1 | 30 | 142 |
| 47 | OR10Q1 | NP_001004471.1 | 31 | 143 |
| 48 | OR10Z1 | NP_001004478.1 | 32 | 144 |
| 49 | OR11H1 | NP_001005239 | 33 | 145 |
| 50 | OR11H4 | NP_001004479.1 | 34 | 146 |
| 51 | OR11H4 | NP_001004479.1 | 34 | 147 |
| 52 | OR11H4 | NP_001004479.1 | 34 | 148 |
| 53 | OR13C8 | HP_001004483.1 | 35 | 149 |
| 54 | OR13G1 | NP_001005487.1 | 36 | 150 |
| 55 | OR52A4 | AAI40753.1 | 37 | 151 |
| 56 | OR56A4 | NP_001005179.3 | 38 | 152 |

TABLE 1-2

| | | | | (3) SEQ ID NO |
|---|---|---|---|---|
| | (1) | | (2) SEQ ID NO | of consensus |
| | Olfactory | | of amino acid | amino acid |
| No. | receptor | Accession No. | sequence | sequence |
| 57 | OR2B11 | NP_001004492.1 | 39 | 153 |
| 58 | OR2C3 | NP_932340.4 | 40 | 154 |
| 59 | OR2G2 | NP_001001915.1 | 41 | 155 |
| 60 | OR2G3 | NP_001001914.1 | 42 | 156 |
| 61 | OR2L2 | NP_001004686.1 | 43 | 157 |
| 62 | OR2L3 | NP_001004687.1 | 44 | 158 |
| 63 | OR2L5 | NP_001245213.1 | 45 | 159 |
| 64 | OR2L8 | NP_001001963.1 | 46 | 160 |
| 65 | OR2L13 | NP_001291464.1 | 47 | 161 |
| 66 | OR2M2 | NP_001004688.1 | 48 | 162 |
| 67 | OR2M4 | NP_059974.1 | 49 | 163 |
| 68 | OR2T1 | NP_112166.2 | 50 | 164 |
| 69 | OR2T4 | NP_001004696.2 | 51 | 165 |
| 70 | OR2T5 | NP_001004697.1 | 52 | 166 |
| 71 | OR2T6 | NP_001005471.1 | 53 | 167 |
| 72 | OR2T7 | NP_001372981.1 | 54 | 168 |
| 73 | OR2T8 | NP_001005522.1 | 55 | 169 |
| 74 | OR2T12 | NP_001004692.1 | 56 | 170 |
| 75 | OR2T27 | NP_001001824.1 | 57 | 171 |
| 76 | OR2T29 | NP_001004694.2 | 58 | 172 |
| 77 | OR2T33 | NP_001004695.1 | 59 | 173 |
| 78 | OR2T34 | NP_001001821.1 | 60 | 174 |
| 79 | OR2T35 | NP_001001827.1 | 61 | 175 |
| 80 | OR2AK2 | NP_001004491.1 | 62 | 176 |
| 81 | OR4D10 | NP_001004705.1 | 63 | 177 |
| 82 | OR4E2 | NP_001001912.2 | 64 | 178 |
| 83 | OR4F5 | NP_001005484.2 | 65 | 179 |
| 84 | OR4K1 | XP_011535455.1 | 66 | 180 |
| 85 | OR4K2 | NP_001005501.1 | 67 | 181 |
| 86 | OR4K5 | NP_001005483.1 | 68 | 182 |
| 87 | OR4K17 | NP_001004715.3 | 69 | 183 |
| 88 | OR4L1 | NP_001004717.1 | 70 | 184 |
| 89 | OR4M1 | NP_001005500.1 | 71 | 185 |
| 90 | OR4N2 | NP_001004723.1 | 72 | 186 |
| 91 | OR4N5 | NP_001004724.1 | 73 | 187 |
| 92 | OR5A1 | NP_001004728 | 74 | 188 |
| 93 | OR6F1 | NP_001005286.1 | 75 | 189 |
| 94 | OR6J1 | NP_001335162.1 | 76 | 190 |
| 95 | OR7A10 | NP_001005190.1 | 77 | 191 |
| 96 | OR7C2 | NP_036509.1 | 78 | 192 |
| 97 | OR7G2 | NP_001005193.2 | 79 | 193 |
| 98 | OR7G3 | NP_001001958.1 | 80 | 194 |
| 99 | OR10G2 | NP_001005466.2 | 81 | 195 |
| 100 | OR10J1 | NP_036483.3 | 82 | 196 |
| 101 | OR10J3 | NP_001004467.1 | 83 | 197 |
| 102 | OR10K1 | NP_001004473.1 | 84 | 198 |
| 103 | OR10K2 | NP_001004476.1 | 85 | 199 |
| 104 | OR10T2 | NP_001004475.1 | 86 | 200 |
| 105 | OR10X1 | NP_001004477.1 | 87 | 201 |
| 106 | OR11G2 | NP_001372962.1 | 88 | 202 |
| 107 | OR11H6 | NP_001004480.1 | 89 | 203 |
| 108 | OR11H7 | NP_001335202.1 | 90 | 204 |
| 109 | OR11L1 | NP_001001959.1 | 91 | 205 |
| 110 | OR14A2 | NP_001342221.1 | 92 | 206 |
| 111 | OR14A16 | NP_001001966.1 | 93 | 207 |
| 112 | OR14C36 | NP_001001918.1 | 94 | 208 |
| 113 | OR14K1 | NP_001004732.2 | 95 | 209 |
| 114 | OR7E24 | NP_001373037.1 | 96 | 210 |

TABLE 1-3

| | | | | (3) SEQ ID NO |
|---|---|---|---|---|
| | (1) | | (2) SEQ ID NO | of consensus |
| | Olfactory | | of amino acid | amino acid |
| No. | receptor | Accession No. | sequence | sequence |
| 115 | OR1B1 | NP_001004450.2 | 327 | 485 |
| 116 | OR1D2 | NP_002539.2 | 328 | 486 |
| 117 | OR1D4 | NP_003543.3 | 329 | 487 |
| 118 | OR1E2 | NP_003545.1 | 330 | 488 |
| 119 | OR1F1 | NP_036492.1 | 331 | 489 |
| 120 | OR1G1 | NP_003546.1 | 332 | 490 |
| 121 | OR1I1 | NP_001004713.1 | 333 | 491 |
| 122 | OR1J1 | NP_001004451.1 | 334 | 492 |
| 123 | OR1J4 | NP_001004452.1 | 335 | 493 |
| 124 | OR1K1 | NP_543135.1 | 336 | 494 |
| 125 | OR1L1 | NP_001005236.3 | 337 | 495 |
| 126 | OR1L3 | NP_001005234.1 | 338 | 496 |
| 127 | OR1L4 | NP_001005235.1 | 339 | 497 |
| 128 | OR1L6 | NP_001004453.2 | 340 | 498 |
| 129 | OR1L8 | NP_001004454.1 | 341 | 499 |
| 130 | OR1M1 | NP_001004456.1 | 342 | 500 |
| 131 | OR1Q1 | NP_036496.1 | 343 | 501 |
| 132 | OR1S1 | NP_001004458.1 | 344 | 502 |
| 133 | OR1S2 | NP_001004459.1 | 345 | 503 |
| 134 | OR2A1 | NP_001005287.1 | 346 | 504 |
| 135 | OR2A5 | NP_036497.1 | 347 | 505 |
| 136 | OR2A7 | NP_001005328.1 | 348 | 506 |
| 137 | OR2A14 | NP_001001659.1 | 349 | 507 |
| 138 | OR2B2 | NP_149046.2 | 350 | 508 |
| 139 | OR2B3 | NP_001005226.1 | 351 | 509 |
| 140 | OR2B6 | NP_036499.1 | 352 | 510 |
| 141 | OR2C1 | NP_036500.2 | 353 | 511 |
| 142 | OR2F1 | NP_036501.2 | 354 | 512 |
| 143 | OR2F2 | NP_001004685.1 | 355 | 513 |
| 144 | OR2H1 | NP_001304943.1 | 356 | 514 |
| 145 | OR2H2 | NP_009091.3 | 357 | 515 |
| 146 | OR2K2 | NP_995581.1 | 358 | 516 |
| 147 | OR2S2 | NP_063950.2 | 359 | 517 |
| 148 | OR2V1 | NP_001245212.1 | 360 | 518 |
| 149 | OR2V2 | NP_996763.1 | 361 | 519 |
| 150 | OR2Z1 | NP_001004699.1 | 362 | 520 |
| 151 | OR2AE1 | NP_001005276.1 | 363 | 521 |
| 152 | OR2AP1 | NP_001245214.1 | 364 | 522 |
| 153 | OR2AT4 | NP_001005285.1 | 365 | 523 |
| 154 | OR3A1 | NP_002541.2 | 366 | 524 |
| 155 | OR3A3 | NP_036505.3 | 367 | 525 |
| 156 | OR4A5 | NP_001005272.3 | 368 | 526 |
| 157 | OR4A15 | NP_001005275.1 | 369 | 527 |
| 158 | OR4A47 | NP_001005512.2 | 370 | 528 |
| 159 | OR4B1 | NP_001005470.1 | 371 | 529 |
| 160 | OR4C3 | NP_001004702.2 | 372 | 530 |
| 161 | OR4C6 | NP_001004704.1 | 373 | 531 |
| 162 | OR4C11 | NP_001004700.2 | 374 | 532 |
| 163 | OR4C12 | NP_001005270.3 | 375 | 533 |
| 164 | OR4C16 | NP_001004701.2 | 376 | 534 |
| 165 | OR4C46 | NP_001004703.1 | 377 | 535 |
| 166 | OR4D1 | NP_036506.1 | 378 | 536 |
| 167 | OR4D2 | NP_001004707.1 | 379 | 537 |
| 168 | OR4D9 | NP_001004711.1 | 380 | 538 |
| 169 | OR4D11 | NP_001004706.1 | 381 | 539 |
| 170 | OR4F17 | MP_001005240.1 | 382 | 540 |
| 171 | OR4F21 | NP_001005504.1 | 383 | 541 |
| 172 | OR4P4 | NP_001004124.1 | 384 | 542 |
| 173 | OR4X1 | NP_001004726.1 | 385 | 543 |
| 174 | OR4X2 | NP_001004727.1 | 386 | 544 |
| 175 | OR5B2 | NP_001005566.1 | 387 | 545 |
| 176 | OR5B12 | NP_001004733.1 | 388 | 546 |
| 177 | OR5B17 | NP_001005489.1 | 389 | 547 |
| 178 | OR5H1 | NP_001005338.1 | 390 | 548 |
| 179 | OR5H2 | NP_001005482.2 | 391 | 549 |
| 180 | OR5H6 | NP_001005479.2 | 392 | 550 |
| 181 | OR5H14 | NP_001005514.1 | 393 | 551 |
| 182 | OR5K3 | NP_001005516.1 | 394 | 552 |
| 183 | OR5AK2 | NP_001005323.1 | 395 | 553 |
| 184 | OR5AR1 | NP_001004730.1 | 396 | 554 |
| 185 | OR5AS1 | NP_001001921.1 | 397 | 555 |
| 186 | OR6B1 | NP_001005281.1 | 398 | 556 |
| 187 | OR6B3 | NP_775486.1 | 399 | 557 |
| 188 | OR6C2 | NP_473446.1 | 400 | 558 |
| 189 | OR6C3 | NP_473445.1 | 401 | 559 |
| 190 | OR6C4 | NP_001372904.1 | 402 | 560 |
| 191 | OR6C6 | NP_001005493.1 | 403 | 561 |
| 192 | OR6C65 | NP_001005518.1 | 404 | 562 |
| 193 | OR6C68 | NP_001005519.2 | 405 | 563 |
| 194 | OR6C70 | NP_001005499.1 | 406 | 564 |

TABLE 1-4

| | | | | (3) SEQ ID NO |
|---|---|---|---|---|
| | | | (2) SEQ ID NO | of consensus |
| | (1) Olfactory | | of amino acid | amino acid |
| No. | receptor | Accession No. | sequence | sequence |
| 195 | OR6C74 | NP_001005490.1 | 407 | 565 |
| 196 | OR6C75 | NP_001005497.1 | 408 | 566 |
| 197 | OR6C76 | NP_001005183.1 | 409 | 567 |
| 198 | OR6K3 | NP_001005327.2 | 410 | 568 |
| 199 | OR6K6 | NP_001005184.1 | 411 | 569 |
| 200 | OR6N2 | NP_001005278.1 | 412 | 570 |
| 201 | OR8S1 | NP_001377778.1 | 413 | 571 |
| 202 | OR9A2 | NP_001001658.1 | 414 | 572 |
| 203 | OR9A4 | NP_001001656.1 | 415 | 573 |
| 204 | OR10A3 | NP_001003745.1 | 416 | 574 |
| 205 | OR10A7 | NP_001005280.1 | 417 | 575 |
| 206 | OR10G6 | NP_001342148.1 | 418 | 576 |
| 207 | OR10G9 | NP_001001953.1 | 419 | 577 |
| 208 | OR10H1 | NP_039228.1 | 420 | 578 |
| 209 | OR10H2 | NP_039227.1 | 421 | 579 |
| 210 | OR10H3 | NP_039226.1 | 422 | 580 |
| 211 | OR10H4 | NP_001004465.1 | 423 | 581 |
| 212 | OR10H5 | NP_001004466.1 | 424 | 582 |
| 213 | OR10P1 | NP_996782.1 | 425 | 583 |
| 214 | OR10S1 | NP_001004474.1 | 426 | 584 |
| 215 | OR10V1 | NP_001005324.1 | 427 | 585 |
| 216 | OR10W1 | NP_997257.2 | 428 | 586 |
| 217 | OR10AD1 | NP_001004134.1 | 429 | 587 |
| 218 | OR10AG1 | NP_001005491.2 | 430 | 588 |
| 219 | OR11A1 | NP_039225.1 | 431 | 589 |
| 220 | OR11H2 | NP_001184216.2 | 432 | 590 |
| 221 | OR12D2 | NP_039224.2 | 433 | 591 |
| 222 | OR12D3 | NP_112221.1 | 434 | 592 |
| 223 | OR13A1 | NP_001004297.2 | 435 | 593 |
| 224 | OR13C2 | NP_001004481.1 | 436 | 594 |
| 225 | OR13C3 | NP_001001961.2 | 437 | 595 |
| 226 | OR13C4 | NP_001001919.1 | 438 | 596 |
| 227 | OR13C9 | NP_001001956.1 | 439 | 597 |
| 228 | OR13F1 | NP_001004485.1 | 440 | 598 |
| 229 | OR51A2 | NP_001004748.1 | 441 | 599 |
| 230 | OR51A4 | NP_001005329.1 | 442 | 600 |
| 231 | OR51A7 | NP_001004749.1 | 443 | 601 |
| 232 | OR51B2 | NP_149420.4 | 444 | 602 |
| 233 | OR51B4 | NP_149419.2 | 445 | 603 |
| 234 | OR51B5 | NP_001005567.2 | 446 | 604 |
| 235 | OR51B6 | NP_001004750.1 | 447 | 605 |
| 236 | OR51D1 | NP_001004751.1 | 448 | 606 |
| 237 | OR51E2 | NP_110401.1 | 449 | 607 |
| 238 | OR51F1 | NP_001004752.2 | 450 | 608 |
| 239 | OR51F2 | NP_001004753.2 | 451 | 609 |
| 240 | OR51G1 | NP_001005237.1 | 452 | 610 |
| 241 | OR51G2 | NP_001005238.1 | 453 | 611 |
| 242 | OR51I1 | NP_001005288.1 | 454 | 612 |
| 243 | OR51I2 | NP_001004754.1 | 455 | 613 |
| 244 | OR51J1 | NP_001335153.1 | 456 | 614 |
| 245 | OR51L1 | NP_001004755.1 | 457 | 615 |
| 246 | OR51M1 | NP_001004756.2 | 458 | 616 |
| 247 | OR51Q1 | NP_001004757.1 | 459 | 617 |
| 248 | OR51S1 | NP_001004758.1 | 460 | 618 |
| 249 | OR51T1 | NP_001004759.2 | 461 | 619 |
| 250 | OR51V1 | NP_001004760.3 | 462 | 620 |
| 251 | OR52A1 | NP_036507.2 | 463 | 621 |
| 252 | OR52A5 | NP_001005160.1 | 464 | 622 |
| 253 | OF52B2 | NP_001004052.1 | 465 | 623 |
| 254 | OR52B4 | NP_001005161.2 | 466 | 624 |
| 255 | OR52B6 | NP_001005162.2 | 467 | 625 |
| 256 | OR52D1 | NP_001005163.1 | 468 | 626 |
| 257 | OR52E5 | NP_001005166.3 | 469 | 627 |
| 258 | OR52E6 | NP_001005167.1 | 470 | 628 |
| 259 | OR52H1 | NP_001005289.2 | 471 | 629 |
| 260 | OR52I1 | NP_001005169.1 | 472 | 630 |
| 261 | OR52I2 | NP_001005170.1 | 473 | 631 |
| 262 | OR52J3 | NP_001001916.2 | 474 | 632 |
| 263 | OR52K1 | NP_001005171.2 | 475 | 633 |
| 264 | OR52K2 | NP_001005172.2 | 476 | 634 |
| 265 | OR52N1 | NP_001001913.1 | 477 | 635 |
| 266 | OR52R1 | NP_001005177.3 | 478 | 636 |
| 267 | OR52W1 | NP_001005178.1 | 479 | 637 |
| 268 | OR56A5 | NP_001139505.1 | 480 | 638 |
| 269 | OR56B4 | NP_001005181.1 | 481 | 639 |
| 270 | OR5AN1 | NP_001004729.1 | 482 | 640 |
| 271 | M71 | NP_997547.1 | 483 | 641 |
| 272 | OR9K2 | NP_001005243.2 | 484 | 642 |

TABLE 1-5

| | | | | (3) SEQ ID |
|---|---|---|---|---|
| | | | (2) SEQ ID | NO of |
| | (1) | | NO of amino | consensus |
| | Olfactory | | acid | amino acid |
| No. | receptor | Accession No. | sequence | sequence |
| 273 | OR2A2 | NP_001005480.2 | 801 | 851 |
| 274 | OR2A12 | NP_001004135.1 | 802 | 852 |
| 275 | OR4S1 | NP_001004725.1 | 803 | 853 |
| 276 | OR5AC2 | NP_473447.1 | 804 | 854 |
| 277 | OR5B3 | NP_001005469.1 | 805 | 855 |
| 278 | OR5D13 | NP_001001967.1 | 806 | 856 |
| 279 | OR5D14 | NP_001004735.1 | 807 | 857 |
| 280 | OR5D16 | NP_001005496.1 | 808 | 858 |
| 281 | OR5D18 | NP_001001952.1 | 809 | 859 |
| 282 | OR5J2 | NP_001005492.1 | 810 | 860 |
| 283 | OR5K4 | NP_001005517.1 | 811 | 861 |
| 284 | OR5L1 | NP_001004738.1 | 812 | 862 |
| 285 | OR5L2 | NP_001004739.1 | 813 | 863 |
| 286 | OR5M1 | NP_001004740.1 | 814 | 864 |
| 287 | OR5M3 | NP_001004742.2 | 815 | 865 |
| 288 | OR5M8 | NP_001005282.1 | 816 | 866 |
| 289 | OR5M9 | NP_001004743.1 | 817 | 867 |
| 290 | OR5M10 | NP_001004741.1 | 818 | 868 |
| 291 | OR5M11 | NP_001005245.1 | 819 | 869 |
| 292 | OR5P2 | NP_703145.1 | 820 | 870 |
| 293 | OR5T1 | NP_001004745.1 | 821 | 871 |
| 294 | OR5T2 | NP_001004746.2 | 822 | 872 |
| 295 | OR5T3 | NP_001004747.2 | 823 | 873 |
| 296 | OR6M1 | NP_001005325.1 | 824 | 874 |
| 297 | OR6N1 | NP_001005185.1 | 825 | 875 |
| 298 | OR6P1 | NP_001153797.1 | 826 | 876 |
| 299 | OR6Q1 | NP_001005186.2 | 827 | 877 |
| 300 | OR6T1 | NP_001005187.1 | 828 | 878 |
| 301 | OR6X1 | NP_001005188.1 | 829 | 879 |
| 302 | OR8B4 | NP_001005196.1 | 830 | 880 |
| 303 | OR8B8 | NP_036510.1 | 831 | 881 |
| 304 | OR8B12 | NP_001005195.1 | 832 | 882 |
| 305 | OR8D1 | NP_001002917.1 | 833 | 883 |
| 306 | OR8G1 | NP_001002905.1 | 834 | 884 |
| 307 | OR8G5 | NP_001005198.2 | 835 | 885 |
| 308 | OR8H2 | NP_001372993.1 | 836 | 886 |
| 309 | OR8I2 | NP_001003750.1 | 837 | 887 |
| 310 | OR8J1 | NP_001005205.2 | 838 | 888 |
| 311 | OR8K1 | NP_001002907.1 | 839 | 889 |
| 312 | OR8K3 | NP_001005202.1 | 840 | 890 |
| 313 | OR8K5 | NP_001004058.2 | 841 | 891 |
| 314 | OR8U1 | NP_001005204.1 | 842 | 892 |
| 315 | OR9G1 | NP_001005213.1 | 843 | 893 |
| 316 | OR9G4 | NP_001377761.1 | 844 | 894 |
| 317 | OR9I1 | NP_001005211.1 | 845 | 895 |
| 318 | OR11H12 | NP_001013372.1 | 846 | 896 |
| 319 | OR52M1 | NP_001004137.1 | 847 | 897 |
| 320 | OR52N5 | NP_001372591.1 | 848 | 898 |
| 321 | OR56A3 | NP_001003443.2 | 849 | 899 |
| 322 | OR5I1 | NP_006628.1 | 850 | 900 |

[0144] In the above Tables 1-1 to 1-5, the olfactory receptor polypeptide consisting of an amino acid sequence of any of SEQ ID NOs: 97, 104, 107, 119, 122, 131, 134, 137, and 146 in (3) is an olfactory receptor polypeptide consisting of the consensus amino acid sequence used in the consensus design of the olfactory receptors (a). The olfactory receptor polypeptide consisting of an amino acid sequence of any of SEQ ID NOs: 98, 105, 108, 120, 123, 132, 135, 138, and 147 is an olfactory receptor polypeptide consisting of the consensus amino acid sequence used in the consensus design of the olfactory receptors (b) The olfactory receptor polypeptide consisting of an amino acid sequence of any of SEQ ID NOs: 99 to 103, 106, 109 to 118, 121, 124 to 130, 133, 136, 139 to 144, 148 to 167, 169 to 178, 180 to 210, 485, 486, 488 to 524, 526 to 589, 591 to 598, 600 to 627, 629 to 642, 850 to 885, and 887 to 900 is an olfactory receptor polypeptide consisting of the consensus amino acid sequence used in the consensus design of the olfactory receptors (c). Among them, the olfactory receptor polypeptide consisting of an amino acid sequence of SEQ ID NO: 210 or 900 is an olfactory receptor polypeptide consisting of the consensus amino acid sequence obtained by changing a consensus residue nearest to the N terminus among the consensus residues to a consensus residue consisting of a methionine residue in the criterion (ii), and the olfactory receptor polypeptide consisting of an amino acid sequence of SEQ ID NO: 642 is an olfactory receptor polypeptide consisting of the consensus amino acid sequence obtained by maintaining an N-terminal structure of the olfactory receptor of interest as it is in the criterion (i), (i-iv). The olfactory receptor polypeptide consisting of an amino acid sequence of any of SEQ ID NOs: 145, 168, 179, 487, 525, 590, 599, 628, and 886 is an olfactory receptor polypeptide consisting of the consensus amino acid sequence used in the consensus design of the olfactory receptors (d).

[0145] The “expression” of the olfactory receptor polypeptide of the present invention means that a translation product is produced from a polynucleotide encoding the polypeptide and the translation product is localized in a functional state on a cell membrane which is a site of its action. The olfactory receptor polypeptide of the present invention can be expressed in cells by an approach known in the art. For example, the olfactory receptor polypeptide can be expressed on cell membranes of cells by transferring a vector containing a polynucleotide encoding the polypeptide to the cells serving as a host, or by transferring a DNA fragment containing a polynucleotide encoding the polypeptide to the genome of the cells serving as a host. Preferably, the olfactory receptor polypeptide is expressed on cell membranes of host cells by transforming the host cells using a vector containing a polynucleotide encoding the polypeptide. The host cells may not be limited as long as the cells can functionally express a foreign olfactory receptor. Specific examples of the cells include, but are not limited to, human embryonic kidney cells (HEK293 cells), Chinese hamster cells (CHO cells), monkey cells (COS cells), isolated olfactory neurons, Xenopus oocytes, insect cells, yeasts, and bacteria.

[0146] The polynucleotide encoding the olfactory receptor polypeptide can be obtained by use of various mutagenesis techniques known in the art. The polynucleotide encoding the olfactory receptor polypeptide can be obtained, for example, by altering a nucleotide sequence encoding the amino acid residue to be altered to a nucleotide sequence encoding an amino acid residue after alteration in a polynucleotide encoding the amino acid sequence of the olfactory receptor of interest.

[0147] A mutation of interest can be introduced to the polynucleotide encoding the amino acid sequence of the olfactory receptor of interest by use of various site-directed mutagenesis techniques well known to those skilled in the art. The site-directed mutagenesis techniques can be performed by an arbitrary approach, for example, inverse PCR or annealing. A commercially available kit for site-directed mutagenesis (e.g., QuickChange II Site-Directed Mutagenesis Kit or QuickChange Multi Site-Directed Mutagenesis Kit from Stratagene California) may be used.

[0148] Alternatively, the polynucleotide encoding the olfactory receptor polypeptide can also be obtained by genome editing using artificial DNA nucleases or programmable nuclease, DNA synthesis based on the nucleotide sequence, or the like.

[0149] The polynucleotide encoding the olfactory receptor polypeptide can contain single-stranded or double-stranded DNA, cDNA, RNA, or other artificial nucleic acids. The DNA, the cDNA, and the RNA may be chemically synthesized. The polynucleotide may contain nucleotide sequences of an open reading frame (ORF) as well as an untranslated region (UTR). The polynucleotide may be codon-optimized for the species of cells for olfactory receptor expressions. Information on codons for use in various organisms is available from Codon Usage Database ([www.kazusa.or.jp/codon/]).

[0150] In a preferred example, the polynucleotide encoding the olfactory receptor polypeptide consists of a nucleotide sequence of any of SEQ ID NOs: 211 to 324, 643 to 800, and 901 to 950. These polynucleotides encode olfactory receptor polypeptides consisting of amino acid sequences of SEQ ID NOs: 97 to 210, 485 to 642, and 851 to 900, respectively. In a more preferred example, the polynucleotide encoding the olfactory receptor polypeptide consists of a nucleotide sequence of any of SEQ ID NOs: 213 to 218, 223 to 232, 235, 237, 239 to 244, 247, 250, 252, 254 to 260, 263 to 324, 643 to 800, and 901 to 950. These polynucleotides encode olfactory receptor polypeptides consisting of amino acid sequences of SEQ ID NOs: 99 to 104, 109 to 118, 121, 123, 125 to 130, 133, 136, 138, 140 to 146, 149 to 210, 485 to 642, and 851 to 900, respectively.

[0151] The obtained polynucleotide encoding the olfactory receptor polypeptide can be incorporated into a vector or a DNA fragment. Preferably, the vector is an expression vector. Also preferably, the vector is an expression vector which can transfer the olfactory receptor polynucleotide to host cells and enables the polynucleotide to be expressed in the host cells. Preferably, the vector may be a vector, such as a plasmid, capable of autonomously proliferating or replicating extrachromosomally, or may be a vector which is integrated into the chromosome. Specific examples of the vector include, but are not limited to, pME18S.

[0152] The vector preferably contains the polynucleotide encoding the olfactory receptor polypeptide, and a control region operably linked thereto. The control region is a sequence for expressing the transferred polynucleotide encoding the olfactory receptor polypeptide in host cells harboring the vector. Examples thereof include expression regulatory regions such as promoters and terminators, and transcription initiation points. The type of the control region can be appropriately selected depending on the type of the vector. The vector or the DNA fragment may optionally further contain a drug (e.g., ampicillin) resistance gene as a selective marker. The control region and the selective marker gene originally contained in the vector may be used, or the control region and the selective marker gene may be incorporated, together with or separately from the polynucleotide encoding the olfactory receptor polypeptide, into the vector.

[0153] Examples of the DNA fragment containing the polynucleotide encoding the olfactory receptor polypeptide include PCR-amplified DNA fragments and restriction enzyme-cleaved DNA fragments. Preferably, the DNA fragment can be an expression cassette containing the polynucleotide and a control region operably linked thereto. Examples of the control region that can be used are the same as in the case of the vector.

[0154] Preferably, a polynucleotide encoding RTP (receptor-transporting protein) (in the present specification, this polynucleotide is also referred to as RTP gene) is transferred, together with the polynucleotide encoding the olfactory receptor polypeptide, into cells in order to promote the cell membrane expression of the olfactory receptor polypeptide. For example, a vector containing the RTP gene and the polynucleotide encoding the olfactory receptor polypeptide may be constructed and transferred into host cells, or a vector containing the RTP gene and a vector containing the polynucleotide encoding the olfactory receptor polypeptide may be transferred into host cells. Examples of the RTP include RTP1S, and examples of the RTP1S include human RTP1S. The human RTP1S is registered as AY562235 in GenBank and is a polypeptide which consists of an amino acid sequence of SEQ ID NO: 326 and is encoded by a gene having a nucleotide sequence of SEQ ID NO: 325.

[0155] A general transformation technique for mammalian cells, for example, an electroporation technique, a lipofection technique, or a particle gun technique, can be used in the transfer of the vector or the DNA fragment into host cells. Transformed cells harboring the vector or the DNA fragment of interest can be selected by exploiting the selective marker. Alternatively, the transfer of the vector or the DNA fragment of interest may be confirmed by examining the DNA sequences of the cells.

[0156] The olfactory receptor polypeptide of the present invention is produced from the polynucleotide encoding the olfactory receptor polypeptide contained in the vector or the DNA fragment transferred into cells by the procedures described above, and integrated to cell membranes. Accordingly, the olfactory receptor polypeptide expressed by the expression method of the present invention is expressed on cell membranes of transformed cells genetically manipulated so as to express the olfactory receptor polypeptide.

[0157] The cell membrane expression (level) of the olfactory receptor polypeptide of the present invention can be measured, for example, by fusing a tag such as a FLAG tag with the olfactory receptor polypeptide in advance, and using an antibody which specifically recognizes the tag in an approach known in the art such as flow cytometry.

[0158] The olfactory receptor polypeptide expressed by the expression method of the present invention is improved in odor responsiveness in comparison with the original olfactory receptor and well maintains the ligand selectivity of the original olfactory receptor. Accordingly, a response of the olfactory receptor polypeptide to an odorant can be regarded as reflecting a response of the original olfactory receptor to olfactory cells. Thus, in an alternative aspect, the present invention provides a method for measuring a response of an olfactory receptor of interest. The method includes measuring a response of an olfactory receptor polypeptide expressed by the method for expressing an olfactory receptor polypeptide according to the present invention. The response measurement method of the present invention can improve the response measurement efficiency of an olfactory receptor of interest and enables response measurement of an olfactory receptor of interest never before possible to functionally analyze due to insufficient cell membrane expression in cultured cells.

[0159] The olfactory receptor polypeptide for use in the response measurement method of the present invention may be an olfactory receptor polypeptide expressed by the expression method of the present invention. The olfactory receptor polypeptide is as mentioned above. Specific examples of the olfactory receptor polypeptide preferably include an olfactory receptor polypeptide consisting of an amino acid sequence of any of SEQ ID NOs: 97 to 210, 485 to 642, and 851 to 900, and more preferably include an olfactory receptor polypeptide consisting of an amino acid sequence of any of SEQ ID NOs: 99 to 104, 109 to 118, 121, 123, 125 to 130, 133, 136, 138, 140 to 146, 149 to 210, 485 to 642, and 851 to 900. The olfactory receptor polypeptide can be used in an arbitrary form without losing its responsiveness to an odorant. The olfactory receptor polypeptide can be used in the form of, for example, a transformed cell expressing the olfactory receptor polypeptide or its cultures, a membrane of the transformed cell having the olfactory receptor polypeptide, or an artificial lipid bilayer having the olfactory receptor polypeptide. Preferably, a transformed cell expressing the olfactory receptor polypeptide or its cultures are used as the olfactory receptor polypeptide.

[0160] In the response measurement method of the present invention, the measurement of the response of the olfactory receptor polypeptide may be performed by an arbitrary method known in the art as a method for measuring responses of olfactory receptors, for example, intracellular cAMP level measurement. For example, it is known that olfactory receptors, when activated by odor molecules, are coupled to G protein a subunit classified into the Gs family in cells to activate adenylate cyclase, thereby increasing intracellular cAMP levels (Nat. Neurosci., 2004, 5: 263-278). Meanwhile, the olfactory receptors, when activated by odor molecules, can also be coupled to proteins belonging to the Gq family, such as Ga15, in cells, thereby increasing calcium ion levels in the cells. Thus, the response of the olfactory receptor polypeptide can be measured by using, as an index, an intracellular cAMP level or a calcium ion level after odor molecule addition, or a behavior of a downstream molecule activated via such a level. Examples of a method for measuring the cAMP level include ELISA and reporter gene assay. Examples of a method for measuring the calcium ion concentration include calcium imaging techniques and TGFα shedding assay. As an example of a method using the behavior of the downstream molecule activated via the cAMP level as an index, a two-electrode voltage clamp technique is also effective which measures potential change inside and outside cell membranes via a cystic fibrosis transmembrane conductance regulator CFTR activated by cAMP signals in Xenopus oocytes.

[0161] As mentioned above, the response of the olfactory receptor polypeptide expressed by the expression method of the present invention can be regarded as reflecting a response of the original olfactory receptor to olfactory cells. Therefore, a ligand for the original olfactory receptor can be searched for using the olfactory receptor polypeptide. Thus, in an alternative aspect, the present invention provides a method for searching for a ligand for an olfactory receptor of interest. The method includes: measuring a response of an olfactory receptor polypeptide expressed by the expression method of the present invention in the presence of a test substance; and selecting a test substance to which the olfactory receptor polypeptide has responded. The ligand search method of the present invention can improve search efficiency of a ligand for an olfactory receptor of interest and enables search for a ligand for an olfactory receptor of interest never before possible to functionally analyze due to insufficient cell membrane expression in cultured cells.

[0162] The test substance for use in the ligand search method of the present invention is not particularly limited as long as it is a substance for which it is desired to confirm whether or not to be a ligand for an olfactory receptor of interest. The test substance may be a naturally occurring substance or a substance artificially synthesized by a chemical or biological method or the like, or may be a compound, a composition, or a mixture.

[0163] The olfactory receptor polypeptide for use in the ligand search method of the present invention and its form are the same as the olfactory receptor polypeptide for use in the response measurement method of the present invention and its form.

[0164] In the ligand search method of the present invention, the test substance is applied to the olfactory receptor polypeptide expressed by the expression method of the present invention. Examples of an approach of applying the test substance to the olfactory receptor polypeptide include, but are not particularly limited to, a method of adding the test substance to a medium for culture of cells expressing the olfactory receptor polypeptide.

[0165] In the ligand search method of the present invention, a response of the olfactory receptor polypeptide to the test substance is measured following the addition of the test substance to the olfactory receptor polypeptide. The same approach as that for the response measurement method of the present invention can be used as a method for measuring the response.

[0166] Subsequently, the test substance is evaluated on the basis of the measured response of the olfactory receptor polypeptide. A test substance which causes the response of the olfactory receptor polypeptide can be determined as a ligand for the olfactory receptor polypeptide, i.e., a ligand for the original olfactory receptor. Thus, in the ligand search method of the present invention, a test substance to which the olfactory receptor polypeptide has responded is selected as a ligand for the original olfactory receptor.

[0167] Preferably, the response of the olfactory receptor polypeptide to the test substance can be evaluated by comparing the response of the olfactory receptor polypeptide supplemented with the test substance (test group) with a response of the olfactory receptor polypeptide in a control group. Examples of the control group can include the olfactory receptor polypeptide non-supplemented with the test substance, the olfactory receptor polypeptide supplemented with a control substance, the olfactory receptor polypeptide supplemented with a lower concentration of the test substance, and the olfactory receptor polypeptide before addition of the test substance. When the response in the test group is higher than that in the control group, the olfactory receptor polypeptide is evaluated as having responded to the test substance and the test substance is selected as a ligand for the original olfactory receptor.

[0168] Thus, in one embodiment of the ligand search method of the present invention, a response of the olfactory receptor polypeptide is measured in the presence and in the absence of a test substance, and subsequently, whether or not the response in the presence of the test substance is higher than that in the absence of the test substance is determined. When the response in the presence of the test substance is higher, the test substance is selected as a ligand. In a preferred embodiment, provided that the response intensity of the olfactory receptor polypeptide in the presence of the test substance is preferably 120% or more, more preferably 150% or more, further more preferably 200% or more, in comparison with that in the absence of the test substance, the test substance is selected as a ligand for the original olfactory receptor. In another preferred embodiment, provided that the response intensity of the olfactory receptor polypeptide in the presence of the test substance is statistically significantly increased in comparison with that in the absence of the test substance, the test substance is selected as a ligand for the original olfactory receptor.

[0169] As mentioned above, the response of the olfactory receptor polypeptide expressed by the expression method of the present invention can be regarded as reflecting a response of the original olfactory receptor to olfactory cells. Therefore, a substance which suppresses the odor recognition of a ligand (odorant) by the original olfactory receptor can be evaluated and/or selected using the olfactory receptor polypeptide. A substance which suppresses the response of the olfactory receptor polypeptide can change the ligand response of the olfactory receptor polypeptide, i.e., change the ligand response of the original olfactory receptor, and consequently selectively suppress odor of the ligand on the basis of olfactory receptor antagonism. On the other hand, a substance which enhances the response of the olfactory receptor polypeptide can change the ligand response of the olfactory receptor polypeptide, i.e., change the ligand response of the original olfactory receptor, and consequently selectively suppress odor of the ligand on the basis of odor cross-adaptation ascribable to olfactory receptor agonism.

[0170] Thus, in an alternative aspect, the present invention provides a method for evaluating and/or selecting a suppressor of odor of a ligand for an olfactory receptor of interest. The method includes measuring a response of the olfactory receptor polypeptide after test substance addition. A test substance which suppresses or enhances the response of the olfactory receptor polypeptide is detected on the basis of the measured response. The detected test substance is selected as a suppressor of odor of the target ligand. Specifically, a test substance which suppresses the response of the olfactory receptor polypeptide is selected as a suppressor of odor of the ligand based on olfactory receptor antagonism, and a test substance which enhances the response of the olfactory receptor polypeptide is selected as a suppressor of odor of the ligand based on odor cross-adaptation ascribable to olfactory receptor agonism. The ligand for an olfactory receptor of interest is preferably a ligand selected by the ligand search method of the present invention. The odor suppressor evaluation and/or selection method of the present invention can efficiently evaluate or select a substance which can selectively suppress odor of the target ligand, and can evaluate or select a substance which can selectively suppress odor of the target ligand even if the target ligand is a ligand for an olfactory receptor never before possible to functionally analyze due to insufficient cell membrane expression in cultured cells.

[0171] The odor suppressor evaluation and/or selection of the present invention can be a method which is performed in vitro or ex vivo.

[0172] The test substance for use in the odor suppressor evaluation and/or selection method of the present invention is not particularly limited as long as the substance is desired to be used as a suppressor of odor of the target ligand. The test substance may be a naturally occurring substance or a substance artificially synthesized by a chemical or biological method or the like, or may be a compound, a composition, or a mixture.

[0173] The olfactory receptor polypeptide for use in the odor suppressor evaluation and/or selection method of the present invention and its form are the same as the olfactory receptor polypeptide for use in the response measurement method of the present invention and its form.

[0174] In the odor suppressor evaluation and/or selection method of the present invention, the test substance is applied to the olfactory receptor polypeptide expressed by the expression method of the present invention. Examples of an approach of applying the test substance to the olfactory receptor polypeptide include, but are not particularly limited to, a method of adding the test substance to a medium for culture of cells expressing the olfactory receptor polypeptide.

[0175] In the odor suppressor evaluation and/or selection method of the present invention, a response of the olfactory receptor polypeptide to the test substance is measured following the addition of the test substance to the olfactory receptor polypeptide. The same approach as that for the response measurement method of the present invention can be used as a method for measuring the response.

[0176] In a first embodiment, the odor suppressor evaluation and/or selection method of the present invention includes: adding a test substance and a target ligand to an olfactory receptor polypeptide expressed by the expression method of the present invention; and measuring a response of the olfactory receptor polypeptide to the ligand. The same approach as that for the method for applying the test substance can be used as a method for applying the ligand to the olfactory receptor polypeptide. Subsequently, a test substance which suppresses the response of the olfactory receptor polypeptide to the ligand is detected on the basis of the measured response. The detected test substance is selected as a suppressor of odor of the ligand.

[0177] In the first embodiment, the test substance which suppresses the response of the olfactory receptor polypeptide to the ligand is selected as a suppressor of odor of the ligand based on olfactory receptor antagonism. The action of the test substance on the response of the olfactory receptor polypeptide to the ligand can be evaluated, for example, by comparing the response of the olfactory receptor polypeptide supplemented with the test substance (test group) to the ligand with a response to the ligand in a control group. Examples of the control group can include the olfactory receptor polypeptide non-supplemented with the test substance, the olfactory receptor polypeptide supplemented with a control substance, the olfactory receptor polypeptide supplemented with a lower concentration of the test substance, the olfactory receptor polypeptide before addition of the test substance, and cells which do not express the olfactory receptor polypeptide. Preferably, the odor suppressor evaluation and/or selection method of the present invention according to the first embodiment includes measuring activity of the olfactory receptor polypeptide against the ligand in the presence and in the absence of the test substance.

[0178] For example, when the response in the test group is more suppressed than the response in the control group, the test substance can be identified as a substance which suppresses the response of the olfactory receptor polypeptide to the target ligand, i.e., a substance which suppresses the response of the original olfactory receptor to the ligand. For example, provided that the response of the olfactory receptor polypeptide in the test group is suppressed to preferably 60% or less, more preferably 50% or less, further more preferably 25% or less, in comparison with the control group, the test substance can be identified as a substance which suppresses the response of the olfactory receptor polypeptide to the ligand, i.e., a substance which suppresses the response of the original olfactory receptor to the ligand. Alternatively, provided that the response of the olfactory receptor polypeptide in the test group is statistically significantly suppressed in comparison with the control group, the test substance can be identified as a substance which suppresses the response of the olfactory receptor polypeptide to the ligand, i.e., a substance which suppresses the response of the original olfactory receptor to the ligand.

[0179] In a second embodiment, the odor suppressor evaluation and/or selection method of the present invention includes: adding a test substance to an olfactory receptor polypeptide expressed by the expression method of the present invention; and measuring a response of the olfactory receptor polypeptide to the test substance. Subsequently, a test substance which enhances the response of the olfactory receptor polypeptide to the target ligand is detected on the basis of the measured response. The detected test substance is selected as a suppressor of odor of the ligand.

[0180] The test substance which enhances the response of the olfactory receptor polypeptide can first enhance the response of the olfactory receptor, thereby weakening the response of the olfactory receptor when later exposed to the target ligand. As a result, the odor recognition of the ligand by an individual can be suppressed on the basis of odor cross-adaptation. Thus, in the second embodiment, a suppressor of odor of the ligand based on odor cross-adaptation ascribable to olfactory receptor agonism is selected.

[0181] The action of the test substance on the olfactory receptor polypeptide can be evaluated, for example, by comparing the response of the olfactory receptor polypeptide supplemented with the test substance (test group) with a response in a control group. Examples of the control group include those mentioned above. Preferably, the odor suppressor evaluation and/or selection method of the present invention according to the second embodiment includes measuring activity of the olfactory receptor polypeptide in the presence and in the absence of the test substance. Also preferably, the odor suppressor evaluation and/or selection method of the present invention according to the second embodiment includes measuring responses of a cell expressing the olfactory receptor polypeptide and a non-expressing cell to the ligand in the presence of the test substance.

[0182] For example, when the response in the test group is enhanced in comparison with the control group, the test substance can be identified as a substance which suppresses the response of the olfactory receptor polypeptide to the target ligand, i.e., a substance which suppresses the response of the original olfactory receptor to the ligand. For example, provided that the response of the olfactory receptor polypeptide in the test group is enhanced to preferably 120% or more, more preferably 150% or more, further more preferably 200%, in comparison with the control group, the test substance can be identified as a substance which suppresses the response of the olfactory receptor polypeptide to the ligand, i.e., a substance which suppresses the response of the original olfactory receptor to the ligand. Alternatively, provided that the response of the olfactory receptor polypeptide in the test group is statistically significantly enhanced in comparison with the control group, the test substance can be identified as a substance which suppresses the response of the olfactory receptor polypeptide to the ligand, i.e., a substance which suppresses the response of the original olfactory receptor to the ligand.

[0183] The test substance identified by the procedures described above is a substance which can suppress the response of the olfactory receptor to the target ligand, thereby suppressing the odor recognition of the ligand by an individual. Thus, the test substance identified by the procedures described above can be selected as a suppressor of odor of the ligand. The substance selected as a suppressor of odor of the target ligand by the odor suppressor evaluation and/or selection method of the present invention can suppress odor of the ligand by suppressing the response of the olfactory receptor to the ligand.

[0184] Thus, in one embodiment, the substance selected by the ligand odor suppressor evaluation and/or selection method of the present invention can be an active ingredient for a suppressor of odor of the ligand. Alternatively, the substance selected by the ligand odor suppressor evaluation and/or selection method of the present invention can be contained as an active ingredient for suppressing odor of the ligand in a compound or a composition for suppressing odor of the ligand. Alternatively, the substance selected by the ligand odor suppressor evaluation and/or selection method of the present invention can be used for producing a suppressor of odor of the ligand or for producing a compound or a composition for suppressing odor of the ligand. The substance can eliminate odor of the target ligand without causing problems, such as discomfort based on strong odor of an aromatic agent and suppression of other odors, which arise in an odor elimination method using a conventional deodorant or aromatic agent.

[0185] Hereinafter, one example of the method for searching for a ligand for an olfactory receptor of interest and the method for evaluating and/or selecting a suppressor of odor of a ligand for an olfactory receptor of interest according to the present invention will be described.

[0186] As shown in Examples mentioned later, as a result of measuring a response of each consensus olfactory receptor expressed by the expression method of the present invention in the presence of methyl mercaptan, dimethyl sulfide, dimethyl disulfide, or dimethyl trisulfide, all of which are sulfur compounds, consensus OR2T29, consensus OR4K17, consensus OR2T27, consensus OR2T5, consensus OR2T4, consensus OR11H2, consensus OR6B3, consensus OR12D3, consensus OR2T11, consensus OR2T1, consensus OR4C15, consensus OR4E2, and consensus OR2L13 responded to methyl mercaptan in the presence of a metal ion (FIG. 10). Consensus OR4K17, consensus OR11H2, consensus OR4C15, and consensus OR4E2 responded to dimethyl sulfide in the presence of a metal ion (FIG. 10). Consensus OR2T29, consensus OR4K17, consensus OR2T27, consensus OR2T5, consensus OR2T4, consensus OR11H2, consensus OR6B3, consensus OR12D3, consensus OR2T11, consensus OR2T1, consensus OR4C15, consensus OR4E2, and consensus OR2L13 responded to dimethyl disulfide in the presence of a metal ion (FIG. 10). Consensus OR2T29, consensus OR2T4, consensus OR11H2, consensus OR6B3, consensus OR12D3, consensus OR6B1, consensus OR2T11, consensus OR2T1, consensus OR4C15, consensus OR4E2, and consensus OR2L13 responded to dimethyl trisulfide in the presence of a metal ion (FIG. 10). Each sulfur compound which causes the response of each of the consensus olfactory receptors is a ligand for each of the consensus olfactory receptors, i.e., a ligand for the original olfactory receptor from which each of the consensus olfactory receptors is derived.

[0187] It has not been recognized so far that OR2T29, OR4K17, OR2T27, OR2T5, OR2T4, OR11H2, OR6B3, OR12D3, and OR6B1 respond to a sulfur compound, particularly, in the presence of a metal ion, or there is that possibility. Meanwhile, it is known that OR2T11 and OR2T1 respond to methyl mercaptan in the presence of a metal ion (JP-B-6122181); OR4C15 and OR2L13 respond to dimethyl trisulfide (JP-A-2020-510436); OR4E2 responds to 3-mercapto-3-methylbutanol and diallyl trisulfide in the presence of a metal ion (JP-A-2020-513564); and OR2T11 responds to dimethyl disulfide, methanethiol, ethanethiol, 1-propanethiol, 2-propanethiol, 1-butanethiol, 2-methyl-2-propanethiol, 2-methyl-1-propanethiol, 2-butanethiol, 3-methyl-2-butanethiol, 2-pentanethiol, and cyclopentanethiol (Block E et al., Nat. Prod. Rep., 34 (5): 529-557 (2017)). Nonetheless, it has not been known so far that these receptors respond to other sulfur compounds, particularly, in the presence of a metal ion.

[0188] Accordingly, OR2T29, OR4K17, OR2T27, OR2T5, OR2T4, OR11H2, OR6B3, OR12D3, and OR6B1 are newly found sulfur compound receptors. In other words, sulfur compounds are newly found ligands for OR2T29, OR4K17, OR2T27, OR2T5, OR2T4, OR11H2, OR6B3, OR12D3, and OR6B1. OR4C15, OR4E2, and OR2L13 are newly found methyl mercaptan receptors; OR4C15 and OR4E2 are newly found dimethyl sulfide receptors; OR2T1, OR4C15, OR4E2, and OR2L13 are newly found dimethyl disulfide receptors; and OR2T11, OR2T1, and OR4E2 are newly found dimethyl trisulfide receptor. In other words, methyl mercaptan is a newly found ligand for OR4C15, OR4E2, and OR2L13; dimethyl sulfide is a newly found ligand for OR4C15 and OR4E2; dimethyl disulfide is a newly found ligand for OR2T1, OR4C15, OR4E2, and OR2L13; and dimethyl trisulfide is a newly found ligand for OR2T11, OR2T1, and OR4E2.

[0189] Thus, in accordance with the method for evaluating and/or selecting a suppressor of odor of a ligand for an olfactory receptor of interest according to the present invention, a suppressor of odor caused by a sulfur compound can be evaluated and/or selected by measuring a response of at least one olfactory receptor polypeptide selected from the group consisting of consensus OR2T29, consensus OR4K17, consensus OR2T27, consensus OR2T5, consensus OR2T4, consensus OR11H2, consensus OR6B3, consensus OR12D3, and consensus OR6B1 after test substance addition in the presence of a metal ion. In the method, a response of at least one olfactory receptor polypeptide selected from the group consisting of consensus OR2T11, OR4S2, consensus OR2T1, consensus OR4C15, consensus OR4E2, and consensus OR2L13 may be further measured. More specifically, a suppressor of odor caused by methyl mercaptan can be evaluated and/or selected by measuring a response of at least one olfactory receptor polypeptide selected from the group consisting of consensus OR4C15, consensus OR4E2, and consensus OR2L13 after test substance addition in the presence of a metal ion. A suppressor of odor caused by dimethyl sulfide can be evaluated and/or selected by measuring a response of at least one olfactory receptor polypeptide selected from the group consisting of consensus OR4C15 and consensus OR4E2 after test substance addition in the presence of a metal ion. A suppressor of odor caused by dimethyl disulfide can be evaluated and/or selected by measuring a response of at least one olfactory receptor polypeptide selected from the group consisting of consensus OR2T1, consensus OR4C15, consensus OR4E2, and consensus OR2L13 after test substance addition in the presence of a metal ion. A suppressor of odor caused by dimethyl trisulfide can be evaluated and/or selected by measuring a response of at least one olfactory receptor polypeptide selected from the group consisting of consensus OR2T11, consensus OR2T1, and consensus OR4E2 after test substance addition in the presence of a metal ion.

[0190] In this context, the “sulfur compound” is a general name for a compound containing sulfur. Preferably, the sulfur compound is a thiol or sulfide compound. More preferred examples of the sulfur compound include methyl mercaptan, dimethyl sulfide, dimethyl disulfide, and dimethyl trisulfide.

[0191] The “odor caused by a sulfur compound” is odor resulting from the sulfur compound mentioned above, preferably odor resulting from a thiol or sulfide compound, more preferably odor resulting from at least one compound selected from the group consisting of methyl mercaptan, dimethyl sulfide, dimethyl disulfide, and dimethyl trisulfide. For example, the odor of methyl mercaptan is included in bad odor coming from a permanent agent, odor of feces, body odor, bad breath, armpit odor, aging odor, old person's smell, smell of garbage, and the like. The odor of dimethyl sulfide, dimethyl disulfide, or dimethyl trisulfide is included in bad odor coming from a permanent agent, bad breath, smell of garbage, sewage odor, bad odor coming from a drainage, and the like. Thus, the “odor caused by a sulfur compound” can be typically bad odor coming from a permanent agent, odor of feces, body odor, bad breath, armpit odor, aging odor, old person's smell, smell of garbage, sewage odor, or bad odor coming from a drainage and is preferably bad odor of a permanent agent or bad breath. The odor suppressor evaluation and/or selection method of the present invention can efficiently evaluate or select a substance which can selectively suppress bad odor, odor caused by a sulfur compound.

[0192] As mentioned above, the response of the olfactory receptor polypeptide expressed by the expression method of the present invention can be regarded as reflecting a response of the original olfactory receptor to olfactory cells. Therefore, a substance which enhances the odor recognition of a ligand (odorant) by the original olfactory receptor can be evaluated and/or selected using the olfactory receptor polypeptide. A substance which enhances the response of the olfactory receptor polypeptide can change the ligand response of the olfactory receptor polypeptide, i.e., change the ligand response of the original olfactory receptor, and consequently selectively enhance odor of the ligand.

[0193] Thus, in an alternative aspect, the present invention provides a method for evaluating and/or selecting an enhancer of odor of a ligand for an olfactory receptor of interest. The method includes: adding a test substance and a target ligand to an olfactory receptor polypeptide expressed by the expression method of the present invention; and measuring a response of the olfactory receptor polypeptide to the ligand. The ligand for an olfactory receptor of interest is preferably a ligand selected by the ligand search method of the present invention. The enhancer evaluation and/or selection method of the present invention can efficiently evaluate or select a substance which can selectively enhance odor of the target ligand, and can evaluate or select a substance which can selectively enhance odor of the target ligand even if the target ligand is a ligand for an olfactory receptor never before possible to functionally analyze due to insufficient cell membrane expression in cultured cells.

[0194] The odor enhancer evaluation and/or selection of the present invention can be a method which is performed in vitro or ex vivo.

[0195] The test substance for use in the odor enhancer evaluation and/or selection method of the present invention is not particularly limited as long as the substance is desired to be used as an enhancer of odor of the target ligand. The test substance may be a naturally occurring substance or a substance artificially synthesized by a chemical or biological method or the like, or may be a compound, a composition, or a mixture.

[0196] The olfactory receptor polypeptide for use in the odor enhancer evaluation and/or selection method of the present invention and its form are the same as the olfactory receptor polypeptide for use in the response measurement method of the present invention and its form.

[0197] In the odor enhancer evaluation and/or selection method of the present invention, the test substance and the target ligand are applied to the olfactory receptor polypeptide expressed by the expression method of the present invention. Examples of an approach of applying the test substance and the target ligand to the olfactory receptor polypeptide include, but are not particularly limited to, a method of adding the test substance and the target ligand to a medium for culture of cells expressing the olfactory receptor polypeptide.

[0198] In the odor enhancer evaluation and/or selection method of the present invention, a response of the olfactory receptor polypeptide to the ligand is measured following the addition of the test substance and the target ligand to the olfactory receptor polypeptide. The same approach as that for the response measurement method of the present invention can be used as a method for measuring the response.

[0199] Subsequently, a test substance which enhances the response of the olfactory receptor polypeptide to the ligand is detected on the basis of the measured response. The detected test substance is selected as an enhancer of odor of the ligand.

[0200] The test substance which enhances the response of the olfactory receptor polypeptide to the ligand is selected as an enhancer of odor of the ligand. The action of the test substance on the response of the olfactory receptor polypeptide to the ligand can be evaluated, for example, by comparing the response of the olfactory receptor polypeptide supplemented with the test substance (test group) to the ligand with a response to the ligand in a control group. Examples of the control group can include the olfactory receptor polypeptide non-supplemented with the test substance, the olfactory receptor polypeptide supplemented with a control substance, the olfactory receptor polypeptide supplemented with a lower concentration of the test substance, the olfactory receptor polypeptide before addition of the test substance, and cells which do not express the olfactory receptor polypeptide. Preferably, the odor enhancer evaluation and/or selection method of the present invention includes measuring activity of the olfactory receptor polypeptide against the ligand in the presence and in the absence of the test substance.

[0201] For example, when the response in the test group is more enhanced than the response in the control group, the test substance can be identified as a substance which enhances the response of the olfactory receptor polypeptide to the target ligand, i.e., a substance which enhances the response of the original olfactory receptor to the ligand. For example, provided that the response of the olfactory receptor polypeptide in the test group is enhanced to preferably 120% or more, more preferably 150% or more, further more preferably 200% or more, in comparison with the control group, the test substance can be identified as a substance which enhances the response of the olfactory receptor polypeptide to the ligand, i.e., a substance which enhances the response of the original olfactory receptor to the ligand. Alternatively, provided that the response of the olfactory receptor polypeptide in the test group is statistically significantly enhanced in comparison with the control group, the test substance can be identified as a substance which enhances the response of the olfactory receptor polypeptide to the ligand, i.e., a substance which enhances the response of the original olfactory receptor to the ligand.

[0202] The test substance identified by the procedures described above is a substance which can enhance the response of the olfactory receptor to the target ligand, thereby enhancing the odor recognition of the ligand by an individual. Thus, the test substance identified by the procedures described above can be selected as an enhancer of odor of the ligand. The substance selected as an enhancer of odor of the target ligand by the odor enhancer evaluation and/or selection method of the present invention can enhance odor of the ligand by enhancing the response of the olfactory receptor to the ligand.

[0203] Thus, in one embodiment, the substance selected by the ligand odor enhancer evaluation and/or selection method of the present invention can be an active ingredient for an enhancer of odor of the ligand. Alternatively, the substance selected by the ligand odor enhancer evaluation and/or selection method of the present invention can be contained as an active ingredient for enhancing odor of the ligand in a compound or a composition for enhancing odor of the ligand. Alternatively, the substance selected by the ligand odor enhancer evaluation and/or selection method of the present invention can be used for producing an enhancer of odor of the ligand or for producing a compound or a composition for enhancing odor of the ligand. The substance can enhance favorable odor of the target ligand, for example.

[0204] The present specification further discloses the following compositions, production methods, uses, or methods as exemplary embodiments of the present invention. However, the present invention is not limited by these embodiments.

[0205] [1] A method for expressing an olfactory receptor polypeptide, comprising
[0206] expressing, in a cell, an olfactory receptor polypeptide consisting of an amino acid sequence obtained by, in an amino acid sequence of an olfactory receptor of interest, altering at least one amino acid residue different from that in a consensus amino acid sequence to an amino acid residue at a position corresponding thereto in the consensus amino acid sequence, wherein
[0207] the consensus amino acid sequence is an amino acid sequence derived by alignment of the amino acid sequence of the olfactory receptor of interest and amino acid sequences of any of the following olfactory receptors (a) to (d):
[0208] (a) at least 11 olfactory receptors selected from the group consisting of olfactory receptors encoded by orthologs of the olfactory receptor of interest in the same order as that of an organism species from which the olfactory receptor of interest is derived;
[0209] (b) at least 11 olfactory receptors selected from the group consisting of the olfactory receptors encoded by orthologs of the olfactory receptor of interest in the same order as that of an organism species from which the olfactory receptor of interest is derived and olfactory receptors encoded by paralogs of the olfactory receptor of interest, the 11 olfactory receptors including at least one of the olfactory receptor encoded by the paralog of the olfactory receptor of interest;
[0210] (c) at least 11 olfactory receptors selected from the group consisting of olfactory receptors encoded by orthologs of the olfactory receptor of interest in vertebrates, the 11 olfactory receptors including at least one olfactory receptor encoded by a vertebrate ortholog in an order different from the order of an organism species from which the olfactory receptor of interest is derived; and
[0211] (d) at least 11 olfactory receptors selected from the group consisting of olfactory receptors encoded by orthologs of the olfactory receptor of interest in vertebrates and olfactory receptors encoded by orthologs in a vertebrate with a paralog having the highest homology to the olfactory receptor of interest among paralogs of the olfactory receptor of interest having 11 or more vertebrate orthologs, the 11 olfactory receptors including at least one olfactory receptor encoded by a vertebrate ortholog of orders different from the order of an organism species from which the olfactory receptor of interest is derived, and
[0212] an olfactory receptor encoded by the paralog.

[0213] [2] The method according to [1] which is a method for improving expression of an olfactory receptor polypeptide.

[0214] [3] A method for functionalizing an olfactory receptor of interest, comprising
[0215] expressing, in a cell, an olfactory receptor polypeptide consisting of an amino acid sequence obtained by, in an amino acid sequence of the olfactory receptor of interest, altering at least one amino acid residue different from that in a consensus amino acid sequence to the amino acid residue at a position corresponding thereto in the consensus amino acid sequence, wherein
[0216] the consensus amino acid sequence is an amino acid sequence derived by alignment of the amino acid sequence of the olfactory receptor of interest and amino acid sequences of any of the following olfactory receptors (a) to (d):
[0217] (a) at least 11 olfactory receptors selected from the group consisting of olfactory receptors encoded by orthologs of the olfactory receptor of interest in the same order as that of an organism species from which the olfactory receptor of interest is derived;
[0218] (b) at least 11 olfactory receptors selected from the group consisting of the olfactory receptors encoded by orthologs of the olfactory receptor of interest in the same order as that of an organism species from which the olfactory receptor of interest is derived and olfactory receptors encoded by paralogs of the olfactory receptor of interest, the 11 olfactory receptors including at least one of the olfactory receptor encoded by the paralog of the olfactory receptor of interest;
[0219] (c) at least 11 olfactory receptors selected from the group consisting of olfactory receptors encoded by orthologs of the olfactory receptor of interest in vertebrates, the 11 olfactory receptors including at least one olfactory receptor encoded by a vertebrate ortholog in an order different from the order of an organism species from which the olfactory receptor of interest is derived; and
[0220] (d) at least 11 olfactory receptors selected from the group consisting of olfactory receptors encoded by orthologs of the olfactory receptor of interest in vertebrates and olfactory receptors encoded by orthologs in a vertebrate with a paralog having the highest homology to the olfactory receptor of interest among paralogs of the olfactory receptor of interest having 11 or more vertebrate orthologs, the 11 olfactory receptors including at least one olfactory receptor encoded by a vertebrate ortholog in an order different from the order of an organism species from which the olfactory receptor of interest is derived, and an olfactory receptor encoded by the paralog.

[0221] [4] The method according to any one of [1] to [3], wherein the consensus amino acid sequence is an amino acid sequence consisting of consensus residues identified in accordance with the following criteria (i) to (iii) from the alignment of the amino acid sequence of the olfactory receptor of interest and the amino acid sequences of any of the olfactory receptors (a) to (d):
[0222] (i) at each amino acid position of the alignment,
   [0223] (i-i) when there exists one amino acid residue which is different from the amino acid residue of the olfactory receptor of interest and has a frequency of appearance of 50% or more, the amino acid residue is identified as a consensus residue,
   [0224] (i-ii) when there exist two amino acid residues having a frequency of appearance of 50%, the amino acid residues of the olfactory receptor of interest are identified as a consensus residue,
   [0225] (i-iii) when there exists an amino acid residue in the olfactory receptor of interest and there exists no amino acid residue having a frequency of appearance of 40% or more, the absence of a consensus residue is identified,
   [0226] (i-iv) when there exists no amino acid residue in the olfactory receptor of interest and there exists an amino acid residue having a frequency of appearance of 60% or more, an amino acid residue having the highest frequency of appearance is identified as a consensus residue, and when there exist two or more amino acid residues having the highest frequency of appearance, an amino acid residue having the smallest molecular weight among the amino acid residues is identified as a consensus residue, and
   [0227] (i-v) if none of the above (i-i) to (i-iv) is appropriate, the amino acid residue of the olfactory receptor of interest is identified as a consensus residue;
[0228] (ii) when the consensus residues are identified in accordance with the criterion (i) and when a consensus residue nearest to the N terminus is a consensus residue at a position corresponding to the N terminus of the olfactory receptor of interest or a C-terminal side thereof and is not a methionine residue, a consensus residue on an N-terminal side of a consensus residue consisting of a methionine residue positioned nearest to the N terminus is changed to the absence of a consensus residue; and
[0229] (iii) when the consensus residues are identified in accordance with the criterion (i) and when a consensus residue nearest to the N terminus is a consensus residue at a position corresponding to an N-terminal side of the N terminus of the olfactory receptor of interest and is not a methionine residue, an amino acid residue having the highest frequency of appearance is identified as a consensus residue until a methionine residue appears by tracing back one by one amino acid positions on an N-terminal side of the position of the consensus residue of the alignment, and when there exist two or more amino acid residues having the highest frequency of appearance, an amino acid residue having the smallest molecular weight among the amino acid residues is identified as a consensus residue.

[0230] [5] The method according to any one of [1] to [4], wherein the olfactory receptors (a) are preferably at least 15 olfactory receptors selected from the group consisting of the olfactory receptors encoded by orthologs of the olfactory receptor of interest in the same order as that of an organism species from which the olfactory receptor of interest is derived.

[0231] [6] The method according to any one of [1] to [4], wherein the olfactory receptors (b) are preferably at least 25 olfactory receptors, more preferably at least 35 olfactory receptors, selected from the group consisting of the olfactory receptors encoded by orthologs of the olfactory receptor of interest in the same order as that of an organism species from which the olfactory receptor of interest is derived and olfactory receptor encoded by the paralog of the olfactory receptor of interest, and include an olfactory receptor encoded by a paralog having the highest homology to a gene encoding the olfactory receptor of interest.

[0232] [7] The method according to any one of [1] to [4], wherein the olfactory receptors (c) are preferably at least 15 olfactory receptors, more preferably at least 30 olfactory receptors, selected from the group consisting of the olfactory receptors encoded by orthologs of the olfactory receptor of interest in vertebrates, and
[0233] include at least one, preferably 5, more preferably 10 olfactory receptors encoded by vertebrate orthologs in orders different from the order of an organism species from which the olfactory receptor of interest is derived.

[0234] [8] The method according to any one of [1] to [4], wherein the olfactory receptors (d) are preferably at least 30 olfactory receptors, more preferably at least 60 olfactory receptors, selected from the group consisting of the olfactory receptors encoded by orthologs of the olfactory receptor of interest in vertebrates, and the olfactory receptors encoded by orthologs in a vertebrate with a paralog having the highest homology to the olfactory receptor of interest among paralogs of the olfactory receptor of interest having 11 or more vertebrate orthologs, and an olfactory receptor encoded by the paralog, and
[0235] include at least one, preferably 5, more preferably 10 olfactory receptors encoded by vertebrate orthologs in orders different from the order of an organism species from which the olfactory receptor of interest is derived.

[0236] [9] The method according to any one of [1] to [8], wherein the alignment is preferably alignment of the amino acid sequence of the olfactory receptor of interest and the olfactory receptors (c).

[0237] [10] The method according to any one of [1] to [9], wherein the olfactory receptor of interest is a human olfactory receptor.

[0238] [11] The method according to any one of [1] to [8], wherein the olfactory receptor polypeptide preferably consists of an amino acid sequence derived from an amino acid sequence of sequence identification number (2) of an olfactory receptor (1) in the following Tables 2-1 to 2-5 by altering at least one amino acid residue different from that in a consensus amino acid sequence s sequence identification number (3) to the amino acid residue at a position corresponding thereto in the consensus amino acid sequence, and more preferably consists of a consensus amino acid sequence of sequence identification number (3) in the following Tables 2-1 to 2-5:

TABLE 2-1

| | | (2) SEQ ID NO of | (3) SEQ ID NO of |
|---|---|---|---|
| | (1) Olfactory | amino acid | consensus amino |
| No. | receptor | sequence | acid sequence |
| 1 | OR2A25 | 1 | 97 |
| 2 | OR2A25 | 1 | 98 |
| 3 | OR2A25 | 1 | 99 |
| 4 | OR2AG1 | 2 | 100 |
| 5 | OR2AG2 | 3 | 101 |
| 6 | OR2D2 | 4 | 102 |
| 7 | OR2D3 | 5 | 103 |
| 8 | OR2T11 | 6 | 104 |
| 9 | OR2T11 | 6 | 105 |
| 10 | OR2T11 | 6 | 106 |
| 11 | OR2W1 | 7 | 107 |
| 12 | OR2W1 | 7 | 108 |
| 13 | OR2W1 | 7 | 109 |
| 14 | OR2W3 | 8 | 110 |
| 15 | OR2Y1 | 9 | 111 |
| 16 | OR3A2 | 10 | 112 |
| 17 | OR4A16 | 11 | 113 |
| 18 | OR4C15 | 12 | 114 |
| 19 | OR4D5 | 13 | 115 |
| 20 | OR4D6 | 14 | 116 |
| 21 | OR4F15 | 15 | 117 |
| 22 | OR4K15 | 16 | 118 |
| 23 | OR4Q3 | 17 | 119 |
| 24 | OR4Q3 | 17 | 120 |
| 25 | OR4Q3 | 17 | 121 |
| 26 | OR4S2 | 18 | 122 |
| 27 | OR4S2 | 18 | 123 |
| 28 | OR4S2 | 18 | 124 |
| 29 | OR5A2 | 19 | 125 |
| 30 | OR5C1 | 20 | 126 |
| 31 | OR5W2 | 21 | 127 |
| 32 | OR6A2 | 22 | 128 |
| 33 | OR6B2 | 23 | 129 |
| 34 | OR6C1 | 24 | 130 |
| 35 | OR6Y1 | 25 | 131 |
| 36 | OR6Y1 | 25 | 132 |
| 37 | OR6Y1 | 25 | 133 |
| 38 | OR7A17 | 26 | 134 |
| 39 | OR7A17 | 26 | 135 |
| 40 | OR7A17 | 26 | 136 |
| 41 | OR7D4 | 27 | 137 |
| 42 | OR7D4 | 27 | 138 |
| 43 | OR7D4 | 27 | 139 |
| 44 | OR10A2 | 28 | 140 |
| 45 | OR10A4 | 29 | 141 |
| 46 | OR10D3 | 30 | 142 |
| 47 | OR10Q1 | 31 | 143 |
| 48 | OR10Z1 | 32 | 144 |
| 49 | OR11H1 | 33 | 145 |
| 50 | OR11H4 | 34 | 146 |
| 51 | OR11H4 | 34 | 147 |
| 52 | OR11H4 | 34 | 148 |
| 53 | OR13C8 | 35 | 149 |
| 54 | OR13G1 | 36 | 150 |
| 55 | OR52A4 | 37 | 151 |
| 56 | OR56A4 | 38 | 152 |

TABLE 2-2

| | | (2) SEQ ID NO of | (3) SEQ ID NO of |
|---|---|---|---|
| | (1) Olfactory | amino acid | consensus amino |
| No. | receptor | sequence | acid sequence |
| 57 | OR2B11 | 39 | 153 |
| 58 | OR2C3 | 40 | 154 |
| 59 | OR2G2 | 41 | 155 |
| 60 | OR2G3 | 42 | 156 |
| 61 | OR2L2 | 43 | 157 |
| 62 | OR2L3 | 44 | 158 |
| 63 | OR2L5 | 45 | 159 |
| 64 | OR2L8 | 46 | 160 |
| 65 | OR2L13 | 47 | 161 |
| 66 | OR2M2 | 48 | 162 |
| 67 | OR2M4 | 49 | 163 |
| 68 | OR2T1 | 50 | 164 |
| 69 | OR2T4 | 51 | 165 |
| 70 | OR2T5 | 52 | 166 |
| 71 | OR2T6 | 53 | 167 |
| 72 | OR2T7 | 54 | 168 |
| 73 | OR2T8 | 55 | 169 |
| 74 | OR2T12 | 56 | 170 |
| 75 | OR2T27 | 57 | 171 |
| 76 | OR2T29 | 58 | 172 |
| 77 | OR2T33 | 59 | 173 |
| 78 | OR2T34 | 60 | 174 |
| 79 | OR2T35 | 61 | 175 |
| 80 | OR2AK2 | 62 | 176 |
| 81 | OR4D10 | 63 | 177 |
| 82 | OR4E2 | 64 | 178 |
| 83 | OR4F5 | 65 | 179 |
| 84 | OR4K1 | 66 | 180 |
| 85 | OR4K2 | 67 | 181 |
| 86 | OR4K5 | 68 | 182 |
| 87 | OR4K17 | 69 | 183 |
| 88 | OR4L1 | 70 | 184 |
| 89 | OR4M1 | 71 | 185 |
| 90 | OR4N2 | 72 | 186 |
| 91 | OR4N5 | 73 | 187 |
| 92 | OR5A1 | 74 | 188 |
| 93 | OR6F1 | 75 | 189 |
| 94 | OR6J1 | 76 | 190 |
| 95 | OR7A10 | 77 | 191 |
| 96 | OR7C2 | 78 | 192 |
| 97 | OR7G2 | 79 | 193 |
| 98 | OR7G3 | 80 | 194 |
| 99 | OR10G2 | 81 | 195 |
| 100 | OR10J1 | 82 | 196 |
| 101 | OR10J3 | 83 | 197 |
| 102 | OR10K1 | 84 | 198 |
| 103 | OR10K2 | 85 | 199 |
| 104 | OR10T2 | 86 | 200 |
| 105 | OR10X1 | 87 | 201 |
| 106 | OR11G2 | 88 | 202 |
| 107 | OR11H6 | 89 | 203 |
| 108 | OR11H7 | 90 | 204 |
| 109 | OR11L1 | 91 | 205 |
| 110 | OR14A2 | 92 | 206 |
| 111 | OR14A16 | 93 | 207 |
| 112 | OR14C36 | 94 | 208 |
| 113 | OR14K1 | 95 | 209 |

TABLE 2-3

| | | (2) SEQ ID NO of | (3) SEQ ID NO of |
|---|---|---|---|
| | (1) Olfactory | amino acid | consensus amino |
| No. | receptor | sequence | acid sequence |
| 115 | OR1B1 | 327 | 485 |
| 116 | OR1D2 | 328 | 486 |
| 117 | OR1D4 | 329 | 487 |
| 118 | OR1E2 | 330 | 488 |
| 119 | OR1F1 | 331 | 489 |
| 120 | OR1G1 | 332 | 490 |
| 121 | OR1I1 | 333 | 491 |
| 122 | OR1J1 | 334 | 492 |
| 123 | OR1J4 | 335 | 493 |
| 124 | OR1K1 | 336 | 494 |
| 125 | OR1L1 | 337 | 495 |
| 126 | OR1L3 | 338 | 496 |
| 127 | OR1L4 | 339 | 497 |
| 128 | OR1L6 | 340 | 498 |
| 129 | OR1L8 | 341 | 499 |
| 130 | OR1M1 | 342 | 500 |
| 131 | OR1Q1 | 343 | 501 |
| 132 | OR1S1 | 344 | 502 |
| 133 | OR1S2 | 345 | 503 |
| 134 | OR2A1 | 346 | 504 |
| 135 | OR2A5 | 347 | 505 |
| 136 | OR2A7 | 348 | 506 |
| 137 | OR2A14 | 349 | 507 |
| 138 | OR2B2 | 350 | 508 |
| 139 | OR2B3 | 351 | 509 |
| 140 | OR2B6 | 352 | 510 |
| 141 | OR2C1 | 353 | 511 |
| 142 | OR2F1 | 354 | 512 |
| 143 | OR2F2 | 355 | 513 |
| 144 | OR2H1 | 356 | 514 |
| 145 | OR2H2 | 357 | 515 |
| 146 | OR2K2 | 358 | 516 |
| 147 | OR2S2 | 359 | 517 |
| 148 | OR2V1 | 360 | 518 |
| 149 | OR2V2 | 361 | 519 |
| 150 | OR2Z1 | 362 | 520 |
| 151 | OR2AE1 | 363 | 521 |
| 152 | OR2AP1 | 364 | 522 |
| 153 | OR2AT4 | 365 | 523 |
| 154 | OR3A1 | 366 | 524 |
| 155 | OR3A3 | 367 | 525 |
| 156 | OR4A5 | 368 | 526 |
| 157 | OR4A15 | 369 | 527 |
| 158 | OR4A47 | 370 | 528 |
| 159 | OR4B1 | 371 | 529 |
| 160 | OR4C3 | 372 | 530 |
| 161 | OR4G6 | 373 | 531 |
| 162 | OR4C11 | 374 | 532 |
| 163 | OR4C12 | 375 | 533 |
| 164 | OR4C16 | 376 | 534 |
| 165 | OR4C46 | 377 | 535 |
| 166 | OR4D1 | 378 | 536 |
| 167 | OR4D2 | 379 | 537 |
| 168 | OR4D9 | 380 | 538 |
| 169 | OR4D11 | 381 | 539 |
| 170 | OR4F17 | 382 | 540 |
| 171 | OR4F21 | 383 | 541 |
| 172 | OR4P4 | 384 | 542 |
| 173 | OR4X1 | 385 | 543 |
| 174 | OR4X2 | 386 | 544 |
| 175 | OR5B2 | 387 | 545 |
| 176 | OR5B12 | 388 | 546 |
| 177 | OR5B17 | 389 | 547 |
| 178 | OR5H1 | 390 | 548 |
| 179 | OR5H2 | 391 | 549 |
| 180 | OR5H6 | 392 | 550 |
| 181 | OR5H14 | 393 | 551 |
| 182 | OR5K3 | 394 | 552 |
| 183 | OR5AK2 | 395 | 553 |
| 184 | OR5AR1 | 396 | 554 |
| 185 | OR5AS1 | 397 | 555 |
| 186 | OR6B1 | 398 | 556 |
| 187 | OR6B3 | 399 | 557 |
| 188 | OR6C2 | 400 | 558 |
| 189 | OR6C3 | 401 | 559 |
| 190 | OR6C4 | 402 | 560 |
| 191 | OR6C6 | 403 | 561 |
| 192 | OR6C65 | 404 | 562 |
| 193 | OR6C68 | 405 | 563 |
| 194 | OR6C70 | 406 | 564 |

TABLE 2-4

| | | (2) SEQ ID NO of | (3) SEQ ID NO of |
|---|---|---|---|
| | (1) Olfactory | amino acid | consensus amino |
| No. | receptor | sequence | acid sequence |
| 195 | OR6C74 | 407 | 565 |
| 196 | OR6C75 | 408 | 566 |
| 197 | OR6C76 | 409 | 567 |
| 198 | OR6K3 | 410 | 568 |
| 199 | OR6K6 | 411 | 569 |
| 200 | OR6N2 | 412 | 570 |
| 201 | OR8S1 | 413 | 571 |
| 202 | OR9A2 | 414 | 572 |
| 203 | OR9A4 | 415 | 573 |
| 204 | OR10A3 | 416 | 574 |
| 205 | OR10A7 | 417 | 575 |
| 206 | OR10G6 | 418 | 576 |
| 207 | OR10G9 | 419 | 577 |
| 208 | OR10H1 | 420 | 578 |
| 209 | OR10H2 | 421 | 579 |
| 210 | OR10H3 | 422 | 580 |
| 211 | OR10H4 | 423 | 581 |
| 212 | OR10H5 | 424 | 582 |
| 213 | OR10P1 | 425 | 583 |
| 214 | OR10S1 | 426 | 584 |
| 215 | OR10V1 | 427 | 585 |
| 216 | OR10W1 | 428 | 586 |
| 217 | OR10AD1 | 429 | 587 |
| 218 | OR10AG1 | 430 | 588 |
| 219 | OR11A1 | 431 | 589 |
| 220 | OR11H2 | 432 | 590 |
| 221 | OR12D2 | 433 | 591 |
| 222 | OR12D3 | 434 | 592 |
| 223 | OR13A1 | 435 | 593 |
| 224 | OR13C2 | 436 | 594 |
| 225 | OR13C3 | 437 | 595 |
| 226 | OR13C4 | 438 | 596 |
| 227 | OR13C9 | 439 | 597 |
| 228 | OR13F1 | 440 | 598 |
| 229 | OR51A2 | 441 | 599 |
| 230 | OR51A4 | 442 | 600 |
| 231 | OR51A7 | 443 | 601 |
| 232 | OR51B2 | 444 | 602 |
| 233 | OR51B4 | 445 | 603 |
| 234 | OR51B5 | 446 | 604 |
| 235 | OR51B6 | 447 | 605 |
| 236 | OR51D1 | 448 | 606 |
| 237 | OR51E2 | 449 | 607 |
| 238 | OR51F1 | 450 | 608 |
| 239 | OR51F2 | 451 | 609 |
| 240 | OR51G1 | 452 | 610 |
| 241 | OR51G2 | 453 | 611 |
| 242 | OR51I1 | 454 | 612 |
| 243 | OR51I2 | 455 | 613 |
| 244 | OR51J1 | 456 | 614 |
| 245 | OR51L1 | 457 | 615 |
| 246 | OR51M1 | 458 | 616 |
| 247 | OR51Q1 | 459 | 617 |
| 248 | OR51S1 | 460 | 618 |
| 249 | OR51T1 | 461 | 619 |
| 250 | OR51V1 | 462 | 620 |
| 251 | OR52A1 | 463 | 621 |
| 252 | OR52A5 | 464 | 622 |
| 253 | OR52B2 | 465 | 623 |
| 254 | OR52B4 | 466 | 624 |
| 255 | OR52B6 | 467 | 625 |
| 256 | OR52D1 | 468 | 626 |
| 257 | OR52E5 | 469 | 627 |
| 258 | OR52E6 | 470 | 628 |
| 259 | OR52H1 | 471 | 629 |
| 260 | OR52I1 | 472 | 630 |
| 261 | OR52I2 | 473 | 631 |
| 262 | OR52J3 | 474 | 632 |
| 263 | OR52K1 | 475 | 633 |
| 264 | OR52K2 | 476 | 634 |
| 265 | OR52N1 | 477 | 635 |
| 266 | OR52R1 | 478 | 636 |
| 267 | OR52W1 | 479 | 637 |
| 268 | OR56A5 | 480 | 638 |
| 269 | OR56B4 | 481 | 639 |
| 270 | OR5AN1 | 482 | 640 |
| 271 | M71 | 483 | 641 |

TABLE 2-5

| | | | (3) SEQ ID NO |
|---|---|---|---|
| | | (2) SEQ ID NO | of consensus |
| | (1) Olfactory | of amino acid | amino acid |
| No. | receptor | sequence | sequence |
| 273 | OR2A2 | 801 | 851 |
| 274 | OR2A12 | 802 | 852 |
| 275 | OR4S1 | 803 | 853 |
| 276 | OR5AC2 | 804 | 854 |
| 277 | OR5B3 | 805 | 855 |
| 278 | OR5D13 | 806 | 856 |
| 279 | OR5D14 | 807 | 857 |
| 280 | OR5D16 | 808 | 858 |
| 281 | OR5D18 | 809 | 859 |
| 282 | OR5J2 | 810 | 860 |
| 283 | OR5K4 | 811 | 861 |
| 284 | OR5L1 | 812 | 862 |
| 285 | OR5L2 | 813 | 863 |
| 286 | OR5M1 | 814 | 864 |
| 287 | OR5M3 | 815 | 865 |
| 288 | OR5M8 | 816 | 866 |
| 289 | OR5M9 | 817 | 867 |
| 290 | OR5M10 | 818 | 868 |
| 291 | OR5M11 | 819 | 869 |
| 292 | OR5P2 | 820 | 870 |
| 293 | OR5T1 | 821 | 871 |
| 294 | OR5T2 | 822 | 872 |
| 295 | OR5T3 | 823 | 873 |
| 296 | OR6M1 | 824 | 874 |
| 297 | OR6N1 | 825 | 875 |
| 298 | OR6P1 | 826 | 876 |
| 299 | OR6Q1 | 827 | 877 |
| 300 | OR6T1 | 828 | 878 |
| 301 | OR6X1 | 829 | 879 |
| 302 | OR8B4 | 830 | 880 |
| 303 | OR8B8 | 831 | 881 |
| 304 | OR8B12 | 832 | 882 |
| 305 | OR8D1 | 833 | 883 |
| 306 | OR8G1 | 834 | 884 |
| 307 | OR8G5 | 835 | 885 |
| 308 | OR8H2 | 836 | 886 |
| 309 | OR8I2 | 837 | 887 |
| 310 | OR8J1 | 838 | 888 |
| 311 | OR8K1 | 839 | 889 |
| 312 | OR8K3 | 840 | 890 |
| 313 | OR8K5 | 841 | 891 |
| 314 | OR8U1 | 842 | 892 |
| 315 | OR9G1 | 843 | 893 |
| 316 | OR9G4 | 844 | 894 |
| 317 | OR9I1 | 845 | 895 |
| 318 | OR11H12 | 846 | 896 |
| 319 | OR52M1 | 847 | 897 |
| 320 | OR52N5 | 848 | 898 |
| 321 | OR56A3 | 849 | 899 |

[0239] [12] The method according to [11], wherein the olfactory receptor polypeptide preferably consists of an amino acid sequence of any of SEQ ID NOs: 97 to 209, 485 to 641, and 851 to 899, and more preferably consists of an amino acid sequence of any of SEQ ID NOs: 99 to 104, 109 to 118, 121, 123, 125 to 130, 133, 136, 138, 140 to 146, 149 to 209, 485 to 641, and 851 to 899.

[0240] [13] A method for expressing an olfactory receptor polypeptide, comprising
[0241] expressing, in a cell, an olfactory receptor polypeptide consisting of an amino acid sequence obtained by, in an amino acid sequence of an olfactory receptor of interest, altering at least one amino acid residue different from that in a consensus amino acid sequence to the amino acid residue at a position corresponding thereto in the consensus amino acid sequence, wherein
[0242] the olfactory receptor polypeptide consists of an amino acid sequence obtained by, in an amino acid sequence of SEQ ID NO: 96 of a human olfactory receptor OR7E24, altering at least one amino acid residue different from that in a consensus amino acid sequence of SEQ ID NO: 210 to the amino acid residue at a position corresponding thereto in the consensus amino acid sequence, and preferably consists of an amino acid sequence of SEQ ID NO: 210,
[0243] the olfactory receptor polypeptide consists of an amino acid sequence obtained by, in an amino acid sequence of SEQ ID NO: 484 of a human olfactory receptor OR9K2, altering at least one amino acid residue different from that in a consensus amino acid sequence of in SEQ ID NO: 642 to the amino acid residue at a position corresponding thereto in the consensus amino acid sequence, and preferably consists of an amino acid sequence of SEQ ID NO: 642, or
[0244] the olfactory receptor polypeptide consists of an amino acid sequence obtained by, in an amino acid sequence of SEQ ID NO: 850 of a human olfactory receptor OR5I1, altering at least one amino acid residue different from that in a consensus amino acid sequence of SEQ ID NO: 900 to the amino acid residue at a position corresponding thereto in the consensus amino acid sequence.

[0245] [14] The method according to [13] which is a method for improving expression of an olfactory receptor polypeptide.

[0246] [15] A method for functionalizing an olfactory receptor of interest, comprising
[0247] expressing, in a cell, an olfactory receptor polypeptide consisting of an amino acid sequence obtained by, in an amino acid sequence of the olfactory receptor of interest, altering at least one amino acid residue different from that in a consensus amino acid sequence to the amino acid residue of the consensus amino acid sequence at a position corresponding thereto, wherein
[0248] the olfactory receptor polypeptide consists of an amino acid sequence obtained by, in an amino acid sequence of SEQ ID NO: 96 of a human olfactory receptor OR7E24, altering at least one amino acid residue different from that in a consensus amino acid sequence of SEQ ID NO: 210 to the amino acid residue at a position corresponding thereto in the consensus amino acid sequence, and preferably consists of an amino acid sequence of SEQ ID NO: 210,
[0249] the olfactory receptor polypeptide consists of an amino acid sequence obtained by, in an amino acid sequence of SEQ ID NO: 484 of a human olfactory receptor OR9K2, altering at least one amino acid residue different from that in a consensus amino acid sequence of SEQ ID NO: 642 to the amino acid residue at a position corresponding thereto in the consensus amino acid sequence, and preferably consists of an amino acid sequence set forth in SEQ ID NO: 642, or
[0250] the olfactory receptor polypeptide consists of an amino acid sequence obtained by, in an amino acid sequence of SEQ ID NO: 850 of a human olfactory receptor OR5I1, altering at least one amino acid residue different from that in a consensus amino acid sequence of SEQ ID NO: 900 to the amino acid residue at a position corresponding thereto in the consensus amino acid sequence.

[0251] [16] The method according to any one of [1] to [15], wherein the olfactory receptor polypeptide is expressed on a cell membrane of the cell.

[0252] [17] The method according to any one of [1] to [16], preferably further comprising causing the cell to express RTP1S.

[0253] [18] The method according to any one of [1] to [17], wherein the cell is a HEK293 cell.

[0254] [19] A method for measuring a response of an olfactory receptor of interest, comprising
[0255] measuring a response of an olfactory receptor polypeptide expressed by the method according to any one of [1] to [18].

[0256] [20] A method for searching for a ligand for an olfactory receptor of interest, comprising:
[0257] measuring a response of an olfactory receptor polypeptide expressed by the method according to any one of [1] to [18] in the presence of a test substance; and
[0258] selecting a test substance to which the olfactory receptor polypeptide has responded.

[0259] [21] The method according to [20], preferably further comprising measuring a response of the olfactory receptor polypeptide in the absence of the test substance.

[0260] [22] The method according to [21], wherein a test substance is preferably selected which increases the response of the olfactory receptor polypeptide in the presence of the test substance to 120% or more of the response in the absence of the test substance.

[0261] [23] The method according to [21], wherein a test substance is preferably selected which statistically significantly increases the response of the olfactory receptor polypeptide in the presence of the test substance in comparison with the response in the absence of the test substance.

[0262] [24] A method for evaluating and/or selecting a suppressor of odor of a ligand for an olfactory receptor of interest, comprising:
[0263] adding a test substance and the ligand for an olfactory receptor of interest to an olfactory receptor polypeptide expressed by the method according to any one of [1] to [18]; and
[0264] measuring a response of the olfactory receptor polypeptide to the ligand.

[0265] [25] The method according to [24], wherein the ligand is a ligand selected by the method according to any one of [20] to [23].

[0266] [26] The method according to [24] or [25], further comprising identifying a test substance which suppresses the response of the olfactory receptor polypeptide on the basis of the measured response.

[0267] [27] The method according to any one of [24] to [26], further comprising measuring a response of the olfactory receptor polypeptide non-supplemented with the test substance to the ligand.

[0268] [28] The method according to [27], further comprising identifying the test substance as a substance which suppresses the response of the olfactory receptor polypeptide to the ligand when the response of the olfactory receptor polypeptide supplemented with the test substance to the ligand is more suppressed than the response of the olfactory receptor polypeptide non-supplemented with the test substance to the ligand.

[0269] [29] A method for evaluating and/or selecting a suppressor of odor of a ligand for an olfactory receptor of interest, comprising:
[0270] adding a test substance to an olfactory receptor polypeptide expressed by the method according to any one of [1] to [18]; and
[0271] measuring a response of the olfactory receptor polypeptide to the test substance.

[0272] [30] The method according to [29], wherein the ligand is a ligand selected by the method according to any one of [20] to [23].

[0273] [31] The method according to [29] or [30], further comprising identifying a test substance which enhances the response of the olfactory receptor polypeptide on the basis of the measured response.

[0274] [32] The method according to any one of [29] to [31], further comprising measuring a response of the olfactory receptor polypeptide non-supplemented with the test substance.

[0275] [33] The method according to [32], further comprising identifying the test substance as a substance which suppresses the response of the olfactory receptor polypeptide to the ligand when the response of the olfactory receptor polypeptide supplemented with the test substance is more enhanced than the response of the olfactory receptor polypeptide non-supplemented with the test substance.

[0276] [34] A method for evaluating and/or selecting an enhancer of odor of a ligand for an olfactory receptor of interest, comprising:
[0277] adding a test substance and the ligand for an olfactory receptor of interest to an olfactory receptor polypeptide expressed by the method according to any one of [1] to [18]; and
[0278] measuring a response of the olfactory receptor polypeptide to the ligand.

[0279] [35] The method according to [34], wherein the ligand is a ligand selected by the method according to any one of [20] to [23].

[0280] [36] The method according to [34] or [35], further comprising identifying a test substance which enhances the response of the olfactory receptor polypeptide on the basis of the measured response.

[0281] [37] The method according to any one of [34] to [36], further comprising measuring a response of the olfactory receptor polypeptide non-supplemented with the test substance to the ligand.

[0282] [38] The method according to [37], further comprising identifying the test substance as a substance which enhances the response of the olfactory receptor polypeptide to the ligand when the response of the olfactory receptor polypeptide supplemented with the test substance to the ligand is more enhanced than the response of the olfactory receptor polypeptide non-supplemented with the test substance to the ligand.

[0283] [39] The method according to any one of [19] to [38], wherein the response of the olfactory receptor polypeptide is preferably measured through intracellular cAMP level measurement by ELISA or reporter gene assay, calcium ion level measurement by calcium imaging or TGFα shedding assay, or potential change measurement inside and outside cell membranes by a two-electrode voltage clamp technique using Xenopus oocytes.

[0284] [40] An altered olfactory receptor polypeptide consisting of
[0285] an amino acid sequence obtained by, in an amino acid sequence of an olfactory receptor of interest, altering at least one amino acid residue different from that in a consensus amino acid sequence to the amino acid residue at a position corresponding thereto in the consensus amino acid sequence, wherein
[0286] the consensus amino acid sequence is an amino acid sequence obtained by alignment of the amino acid sequence of the olfactory receptor of interest and amino acid sequences of any of the following olfactory receptors (a) to (d):
[0287] (a) at least 11 olfactory receptors selected from the group consisting of olfactory receptors encoded by orthologs of the olfactory receptor of interest in the same order as that of an organism species from which the olfactory receptor of interest is derived;
[0288] (b) at least 11 olfactory receptors selected from the group consisting of the olfactory receptors encoded by orthologs of the olfactory receptor of interest in the same order as that of an organism species from which the olfactory receptor of interest is derived and olfactory receptors encoded by paralogs of the olfactory receptor of interest, the 11 olfactory receptors including at least one of the olfactory receptor encoded by the paralog of the olfactory receptor of interest;
[0289] (c) at least 11 olfactory receptors selected from the group consisting of olfactory receptors encoded by orthologs of the olfactory receptor of interest in vertebrates, the 11 olfactory receptors including at least one olfactory receptor encoded by a vertebrate ortholog in an order different from the order of an organism species from which the olfactory receptor of interest is derived; and
[0290] (d) at least 11 olfactory receptors selected from the group consisting of olfactory receptors encoded by orthologs of the olfactory receptor of interest in vertebrates and olfactory receptors encoded by orthologs in a vertebrate with a paralog having the highest homology to the olfactory receptor of interest among paralogs of the olfactory receptor of interest having 11 or more vertebrate orthologs, the 11 olfactory receptors including at least one olfactory receptor encoded by a vertebrate ortholog in an order different from the order of an organism species from which the olfactory receptor of interest is derived, and an olfactory receptor encoded by the paralog.

[0291] [41] The altered olfactory receptor polypeptide according to [40], wherein the consensus amino acid sequence is an amino acid sequence consisting of consensus residues identified in accordance with the following criteria (i) to (iii) from the alignment of the amino acid sequence of the olfactory receptor of interest and the amino acid sequences of any of the olfactory receptors (a) to (d):
[0292] (i) at each amino acid position of the alignment,
   [0293] (i-i) when there exists one amino acid residue which is different from the amino acid residue of the olfactory receptor of interest and has a frequency of appearance of 50% or more, the amino acid residue is identified as a consensus residue,
   [0294] (i-ii) when there exist two amino acid residues having a frequency of appearance of 50%, the amino acid residues of the olfactory receptor of interest are identified as a consensus residue,
   [0295] (i-iii) when there exists an amino acid residue in the olfactory receptor of interest and there exists no amino acid residue having a frequency of appearance of 40% or more, the absence of a consensus residue is identified,
   [0296] (i-iv) when there exists no amino acid residue in the olfactory receptor of interest and there exists an amino acid residue having a frequency of appearance of 60% or more, an amino acid residue having the highest frequency of appearance is identified as a consensus residue, and when there exist two or more amino acid residues having the highest frequency of appearance, an amino acid residue having the smallest molecular weight among the amino acid residues is identified as a consensus residue, and
   [0297] (i-v) if none of the above (i-i) to (i-iv) is appropriate, the amino acid residue of the olfactory receptor of interest is identified as a consensus residue;
[0298] (ii) when the consensus residues are identified in accordance with the criterion (i) and when a consensus residue nearest to the N terminus is a consensus residue at a position corresponding to the N terminus of the olfactory receptor of interest or a C-terminal side thereof and is not a methionine residue, a consensus residue on an N-terminal side of a consensus residue consisting of a methionine residue positioned nearest to the N terminus is changed to the absence of a consensus residue; and
[0299] (iii) when the consensus residues are identified in accordance with the criterion (i) and when a consensus residue nearest to the N terminus is a consensus residue at a position corresponding to an N-terminal side of the N terminus of the olfactory receptor of interest and is not a methionine residue, an amino acid residue having the highest frequency of appearance is identified as a consensus residue until a methionine residue appears by tracing back one by one amino acid positions on an N-terminal side of the position of the consensus residue of the alignment, and when there exist two or more amino acid residues having the highest frequency of appearance, an amino acid residue having the smallest molecular weight among the amino acid residues is identified as a consensus residue.

[0300] [42] The altered olfactory receptor polypeptide according to [40] or [41], wherein the olfactory receptors (a) are preferably at least 15 olfactory receptors selected from the group consisting of the olfactory receptors encoded by orthologs of the olfactory receptor of interest in the same order as that of an organism species from which the olfactory receptor of interest is derived.

[0301] [43] The altered olfactory receptor polypeptide according to [40] or [41], wherein the olfactory receptors (b) are preferably at least 25 olfactory receptors, more preferably at least 35 olfactory receptors, selected from the group consisting of the olfactory receptors encoded by orthologs of the olfactory receptor of interest in the same order as that of an organism species from which olfactory receptor of interest is derived and olfactory receptor encoded by the paralog of the olfactory receptor of interest, and include an olfactory receptor encoded by a paralog having the highest homology to a gene encoding the olfactory receptor of interest.

[0302] [44] The altered olfactory receptor polypeptide according to [40] or [41], wherein the olfactory receptors (c) are preferably at least 15 olfactory receptors, more preferably at least 30 olfactory receptors, selected from the group consisting of the olfactory receptors encoded by orthologs of the olfactory receptor of interest in vertebrates, and
[0303] include at least one, preferably 5, more preferably 10 olfactory receptors encoded by vertebrate orthologs of orders different from the order of an organism species from which the olfactory receptor of interest is derived.

[0304] [45] The altered olfactory receptor polypeptide according to [40] or [41], wherein the olfactory receptors (d) are preferably at least 30 olfactory receptors, more preferably at least 60 olfactory receptors, selected from the group consisting of the olfactory receptors encoded by orthologs of the olfactory receptor of interest in vertebrates, and the olfactory receptors encoded by orthologs in a vertebrate with a paralog having the highest homology to the olfactory receptor of interest among paralogs of the olfactory receptor of interest having 11 or more vertebrate orthologs, and an olfactory receptor encoded by the paralog, and
[0305] include at least one, preferably 5, more preferably 10 olfactory receptors encoded by vertebrate orthologs of orders different from the order of an organism species from which the olfactory receptor of interest is derived.

[0306] [46] The altered olfactory receptor polypeptide according to any one of [40] to [45], wherein the alignment is preferably alignment of the amino acid sequence of the olfactory receptor of interest and the olfactory receptors (c).

[0307] [47] The altered olfactory receptor polypeptide according to any one of [40] to [46], wherein the olfactory receptor of interest is a human olfactory receptor.

[0308] [48] The altered olfactory receptor polypeptide according to any one of [40] to [45], which preferably consists of an amino acid sequence derived from an amino acid sequence of sequence identification number (2) of an olfactory receptor (1) in the above Tables 2-1 to 2-5 by altering at least one amino acid residue different from that in a consensus amino acid sequence of sequence identification number (3) to the amino acid residue at a position corresponding thereto in the consensus amino acid sequence, and more preferably consists of a consensus amino acid sequence of sequence identification number (3) in the above Tables 2-1 to 2-5.

[0309] [49] The altered olfactory receptor polypeptide according to [48], which preferably consists of an amino acid sequence of any of SEQ ID NOs: 97 to 209, 485 to 641, and 851 to 899, and more preferably consists of an amino acid sequence of any of SEQ ID NOs: 99 to 104, 109 to 118, 121, 123, 125 to 130, 133, 136, 138, 140 to 146, 149 to 209, 485 to 641, and 851 to 899.

[0310] [50] An altered olfactory receptor polypeptide
[0311] consisting of an amino acid sequence obtained by, in an amino acid sequence of SEQ ID NO: 96 of a human olfactory receptor OR7E24, altering at least one amino acid residue different from that in a consensus amino acid sequence of SEQ ID NO: 210 to the amino acid residue at a position corresponding thereto in the consensus amino acid sequence, and preferably consisting of an amino acid sequence of SEQ ID NO: 210,
[0312] consisting of an amino acid sequence obtained by, in an amino acid sequence of SEQ ID NO: 484 of a human olfactory receptor OR9K2, altering at least one amino acid residue different from that in a consensus amino acid sequence of SEQ ID NO: 642 to the amino acid residue at a position corresponding thereto in the consensus amino acid sequence, and preferably consisting of an amino acid sequence set forth in SEQ ID NO: 642, or
[0313] consisting of an amino acid sequence obtained by, in an amino acid sequence of SEQ ID NO: 850 of a human olfactory receptor OR5I1, altering at least one amino acid residue different from that in a consensus amino acid sequence of SEQ ID NO: 900 to the amino acid residue at a position corresponding thereto in the consensus amino acid sequence.

[0314] [51] A polynucleotide encoding the altered olfactory receptor polypeptide according to any one of [40] to [50].

[0315] [52] The polynucleotide according to [51] which consists of a nucleotide sequence of any of SEQ ID NOs: 211 to 324, 643 to 800, and 901 to 950, and preferably consists of a nucleotide sequence of any of SEQ ID NOs: 213 to 218, 223 to 232, 235, 237, 239 to 244, 247, 250, 252, 254 to 260, 263 to 324, 643 to 800, and 901 to 950.

[0316] [53] A vector or a DNA fragment comprising the polynucleotide according to [51] or [52].

[0317] [54] A transformed cell comprising the vector or the DNA fragment according to [53].

[0318] [55] The transformed cell according to [54], preferably further comprising a vector or a DNA fragment comprising a polynucleotide encoding RTP1S.

[0319] [56] The transformed cell according to [54] or [55], wherein the cell is a HEK293 cell.

### EXAMPLES

[0320] Hereinafter, the present invention will be more specifically described with reference to Examples.

### Example 1 Preparation and Analysis of Consensus Olfactory Receptor

### 1) Preparation of Olfactory Receptor Gene

[0321] For consensus olfactory receptor design, homologous gene candidates of the gene of an olfactory receptor of interest were searched for using NCBI BLAST. An ortholog group or ortholog and paralog groups were identified as to the obtained gene group.

[0322] Specifically, when the olfactory receptor of interest was a human olfactory receptor, the identification of primate orthologs in (a) was carried out by phylogenetic tree analysis on primate candidate genes searched for by BLAST. For example, in the case of applying the method (a) to human OR2A25, phylogenetic tree analysis was conducted on homologous genes obtained by BLAST search setting the amino acid sequence of human OR2A25 (NP_001004488.1) to a query sequence and an organism name to be searched to primates. A clade was selected which contained human OR2A25, covered OR2A25 of many other organism species, and contained as few genes other than OR2A25 as possible. Among a total of 18 genes contained in the clade, 17 genes except for human OR2A25 were identified as primate orthologs. As a result, these 17 genes exhibited 82% or more amino acid homology to human OR2A25. Subsequently, the amino acid sequences of these 18 genes (Table 3) were subjected to alignment analysis and consensus amino acid identification as mentioned below.

[0323] When the olfactory receptor of interest was a human olfactory receptor, the identification of primate orthologs and paralogs in (b) was carried out by identifying a clade which was adjacent to the identified clade of primate orthologs as a result of the phylogenetic tree analysis for the primate ortholog identification in (a), and contained a gene, having the highest homology to the gene of the olfactory receptor of interest, in the organism species from which the olfactory receptor of interest is derived. Genes contained in the identified clade group were selected as paralogs. Among these paralogs, paralogs were excluded which were not included in top 50 homologous genes of the gene of the olfactory receptor of interest as primate genes searched for by BLAST. For example, in the case of applying the method of (b) to human OR2A25, a clade most proximal to the 18 genes selected as a result of the phylogenetic tree analysis in (a) was selected. In this clade, 20 genes belonged, and human OR2A7 and human OR2A4 were contained as olfactory receptor genes. These 20 genes were included in top 50 genes of a primate gene group having high homology to human OR2A25. In this way, 20 genes including the paralogs were selected, and the amino acid sequences of a total of 38 genes further including the 18 genes used in (a) (Table 3) were subjected to alignment analysis and consensus amino acid identification as mentioned below.

[0324] When the olfactory receptor of interest was a human olfactory receptor, the identification of orthologs in (c) was carried out by selecting genes having the same name as that of the olfactory receptor of interest as orthologs from top homologous genes searched for by BLAST. For example, in the case of applying the method (c) to human OR2A25, 67 genes involving OR2A25 in their names were selected from among top 250 homologous genes searched for by BLAST setting the amino acid sequence of human OR2A25 (NP_001004488.1) to a query sequence. In addition, as for Mus musculus and Rattus norvegicus genes for which a different olfactory receptor nomenclatural system is used, one gene each having the highest homology was selected from among the genes included in the top 250 genes as a result of the search. These 69 genes were identified as orthologs. The amino acid sequences of a total of 70 genes consisting of these 69 genes plus human OR2A25 (Table 3) were subjected to alignment analysis and consensus amino acid identification as mentioned below.

[0325] When the olfactory receptor of interest was each of human olfactory receptors OR2T11, OR2W1, OR4Q3, OR4S2, OR6Y1, OR7D4, OR7A17, and OR11H4, an ortholog group or ortholog and paralog groups were identified in the same manner as above. The amino acid sequences of genes of the identified ortholog group or ortholog and paralog groups plus the original human olfactory receptor gene were subjected to alignment analysis and consensus amino acid identification as mentioned below.

[0326] The alignment analysis on the identified gene group was conducted using Clustal W, and the alignment was further adjusted and optimized with reference to highly conserved amino acids or amino acid motifs among olfactory receptors. Ballesteros-Weinstein residue numbering was performed with reference to results of aligning all mouse olfactory receptors shown in Non Patent Literature 4. On the basis of the alignment results, consensus olfactory receptor design was performed using Jalview. In the alignment, when one amino acid residue which was different from the amino acid residue of a reference amino acid sequence and had a frequency of appearance of 50% or more existed at a position corresponding to each amino acid position in the amino acid sequence of the original human olfactory receptor serving as the reference, the amino acid residue of the reference amino acid sequence was altered to the amino acid residue. Even in the case where one amino acid residue which was different from the amino acid residue of a reference amino acid sequence and had a frequency of appearance of 50% existed at a position corresponding to each amino acid position in the amino acid sequence of the original human olfactory receptor serving as the reference, the amino acid residue of the reference amino acid sequence was not altered when the amino acid residue of the reference amino acid sequence also had a frequency of appearance of 50%. In the alignment, when deletion existed with a frequency of appearance of 40% or more at a position corresponding to each amino acid position in the amino acid sequence of the original human olfactory receptor serving as the reference, the amino acid residue in the reference amino acid sequence was altered to deleted. For example, when deletion existed with a frequency of appearance of 40% or more at a position corresponding to a C-terminal amino acid position, the amino acid residue of the reference amino acid sequence was altered to deleted. When deletion was found with a frequency of appearance of 40% or more at a position corresponding to an initiation methionine position in the human sequence, the first methionine in the amino acid sequence thus altered by the procedures described above was selected as initiation methionine and an amino acid sequence upstream thereof was deleted. Thus, when a consensus residue nearest to the N terminus was a consensus residue at a position corresponding to the N terminus of the olfactory receptor of interest or a C-terminal side thereof and was not a methionine residue, a consensus residue on an N-terminal side of a consensus residue consisting of a methionine residue positioned nearest to the N terminus was changed to the absence of a consensus residue. On the other hand, when an amino acid existed with a frequency of appearance of 60% or more at a position corresponding to a deletion position in the amino acid sequence of the original human olfactory receptor serving as the reference, alteration was made so as to insert the most highly conservative amino acid at the deletion position of the reference amino acid sequence. For example, when a consensus amino acid existed with a frequency of appearance of 60% or more at a position corresponding to a C-terminal deletion position in the amino acid sequence of the original human olfactory receptor serving as the reference, alteration was made so as to insert the most highly conservative amino acid at the C-terminus. When two or more amino acids were most highly conservative, alteration was made so as to insert thereat an amino acid having the smallest molecular weight.

[0327] Olfactory receptor topology in the design was confirmed using TMHMM (transmembrane Hidden Markov model). DNA sequences encoding various olfactory receptor polypeptides thus designed were obtained by DNA synthesis after optimization of nucleotide sequence codons corresponding to the amino acid sequences for expressions in human cultured cells. EcoRI and XhoI sites were added to both ends of the nucleotide sequence and recombined with EcoRI and XhoI sites prepared downstream of a Flag-Rho tag sequence in a pME18S vector. A gene encoding human RTP1S for translocation of an olfactory receptor protein produced in cultured cells onto cell membranes was incorporated into EcoRI and XhoI sites of another pME18S vector to prepare a pME18S-RTP1S vector.

TABLE 3

| (a) | | (b) | | (c) | |
|---|---|---|---|---|---|
| 1 | NP_001004488.1 | 1 | NP_001004488.1 | 1 | NP_001004488.1 |
| 2 | XP_003820570.1 | 2 | XP_003820570.1 | 2 | XP_003820570.1 |
| 3 | XP_527948.3 | 3 | XP_527948.3 | 3 | XP_527948.3 |
| 4 | XP_004046463.1 | 4 | XP_004046463.1 | 4 | XP_004046463.1 |
| 5 | XP_003270919.1 | 5 | XP_003270919.1 | 5 | XP_003270919.1 |
| 6 | XP_011845308.1 | 6 | XP_011845308.1 | 6 | XP_011845308.1 |
| 7 | XP_025236749.1 | 7 | XP_025236749.1 | 7 | XP_025236749.1 |
| 8 | NP_001180903.1 | 8 | NP_001180903.1 | 8 | NP_001180903.1 |
| 9 | XP_021792059.1 | 9 | XP_021792059.1 | 9 | XP_021792059.1 |
| 10 | XP_011912955.1 | 10 | XP_011912955.1 | 10 | XP_011912955.1 |
| 11 | XP_007981509.1 | 11 | XP_007981509.1 | 11 | XP_007981509.1 |
| 12 | XP_023046787.1 | 12 | XP_023046787.1 | 12 | XP_023046787.1 |
| 13 | XP_011796792.1 | 13 | XP_011796792.1 | 13 | XP_011796792.1 |
| 14 | XP_002818656.2 | 14 | XP_002818656.2 | 14 | XP_002818656.2 |
| 15 | XP_003791583.1 | 15 | XP_003791583.1 | 15 | XP_003791583.1 |
| 16 | XP_020145275.1 | 16 | XP_020145275.1 | 16 | XP_020145275.1 |
| 17 | XP_012506030.1 | 17 | XP_012506030.1 | 17 | XP_012506030.1 |
| 18 | XP_008057851.1 | 18 | XP_008057851.1 | 18 | XP_007090917.1 |
| | | 19 | XP_012302993.1 | 19 | XP_008152181.1 |
| | | 20 | XP_003929872.1 | 20 | XP_008057851.1 |
| | | 21 | XP_017831027.1 | 21 | XP_003983225.1 |
| | | 22 | XP_015303692.1 | 22 | XP_014934312.1 |
| | | 23 | XP_011727930.1 | 23 | XP_006159670.1 |
| | | 24 | XP_025236055.1 | 24 | XP_022365921.1 |
| | | 25 | XP_001118110.3 | 25 | XP_014643256.1 |
| | | 26 | XP_011912966.1 | 26 | XP_001503794.2 |
| | | 27 | XP_012506027.1 | 27 | XP_025785816.1 |
| | | 28 | XP_017749246.1 | 28 | XP_021548542.1 |
| | | 29 | XP_003896835.1 | 29 | XP_012589341.1 |
| | | 30 | XP_011845314.1 | 30 | XP_028381605.1 |
| | | 31 | XP_010377726.1 | 31 | XP_027396106.1 |
| | | 32 | XP_012367550.1 | 32 | XP_008695504.1 |
| | | 33 | XP_017363822.1 | 33 | XP_008527468.1 |
| | | 34 | XP_012623594.1 | 34 | XP_025874141.1 |
| | | 35 | XP_003791581.1 | 35 | XP_025289742.1 |
| | | 36 | XP_002818667.2 | 36 | XP_030151663.1 |
| | | 37 | NP_001005328.1 | 37 | XP_025147526.1 |
| | | 38 | NP_112170.1 | 38 | XP_026370229.1 |
| | | | | 39 | XP_004008194.1 |
| | | | | 40 | XP_010843156.1 |
| | | | | 41 | XP_024846708.1 |
| | | | | 42 | XP_027962159.1 |
| | | | | 43 | XP_005886803.1 |
| | | | | 44 | XP_005679621.2 |
| | | | | 45 | XP_020766952.1 |
| | | | | 46 | XP_019484660.1 |
| | | | | 47 | XP_024420338.1 |
| | | | | 48 | XP_025710621.1 |
| | | | | 49 | XP_004772159.1 |
| | | | | 50 | XP_027429786.1 |
| | | | | 51 | XP_011376358.1 |
| | | | | 52 | NP_667199.1 |
| | | | | 53 | NP_001000846.1 |
| | | | | 54 | XP_012412736.2 |
| | | | | 55 | XP_028381731.1 |
| | | | | 56 | XP_006910505.1 |
| | | | | 57 | XP_003420628.1 |
| | | | | 58 | XP_016012670.1 |
| | | | | 59 | XP_028381668.1 |
| | | | | 60 | XP_004409659.1 |
| | | | | 61 | XP_028381669.1 |
| | | | | 62 | XP_029810838.1 |
| | | | | 63 | XP_017513807.1 |
| | | | | 64 | XP_010985279.1 |
| | | | | 65 | XP_010952531.1 |
| | | | | 66 | XP_002921862.1 |
| | | | | 67 | XP_028381686.1 |
| | | | | 68 | XP_014420418.1 |
| | | | | 69 | XP_028381694.1 |
| | | | | 70 | XP_017198162.1 |

2) Preparation of Cultured Cell Transformed with Olfactory Receptor Gene

[0328] For luciferase assay, a reaction solution was prepared according to composition shown in Table 4, left standing for 20 minutes in a clean bench, and then added to each well of a 96-well plate (Becton, Dickinson and Company). Subsequently, 100 μL of HEK293 cells suspended in DMEM (Nacalai Tesque, Inc.) was inoculated at 2×10⁵ cells/cm² to each well, and cultured for 24 hours in an incubator kept at 37° C. and 5% CO₂. Cells expressing no olfactory receptor (Mock) were provided as a control.

[0329] For flow cytometry, 3.3×10⁵ cells were inoculated to each well of a 6-well dish, and 24 hours later, a reaction solution was prepared according to composition shown in Table 5, left standing for 20 minutes in a clean bench, and then added to each well of the 6-well dish. The cells were cultured for 24 hours in an incubator kept at 37° C. and 5% CO₂. In an experiment shown in FIG. 3, the culture was performed for 42 hours as to the original receptors of OR7A17 and OR7D4. Cells expressing no receptor (Mock) were provided as a control.

TABLE 4
Reaction solution composition: per well of 96-well plate

| | |
|---|---|
| DMEM (Nacalai) | 10 μL |
| Olfactory receptor gene | 0.075 μg |
| (incorporated in pME18S vector) | |
| pGL4.29 (fluc2P-CRE-hygro, Promega) | 0.03 μg |
| pGL4.75 (hRluc-CMV, Promega) | 0.03 μg |
| pME18S-RTP1S | 0.03 μg |
| Polyethylenimine-MAX | 0.4 μL |
| (0.1% Aqueous solution (pH7.4), COSMO BIO) | |

TABLE 5

| | |
|---|---|
| DMEM (Nacalai) | 100 μL |
| Olfactory receptor gene | 3.0 μg |
| (incorporated in pME18S vector) | |
| pME18S-RTP1S | 1.0 μg |
| Polyethylenimine-MAX | 10 μL |
| (0.1% Aqueous solution (pH7.4), COSMO BIO) | |

### 3) Measurement of Olfactory Receptor Protein Level on Cell Membrane (Flow Cytometry)

[0330] An anti-FLAG antibody (Cosmo Bio Co., Ltd.) was allowed to act as a primary antibody on cells recovered using a cell stripper on ice for 1 hour. After washing of the cells, PE (phycoerythrin)-conjugated anti-mouse IgG (Abcam plc.) was allowed to act thereon as a secondary antibody on ice for 30 minutes. After washing, 0.25 μg of 7-AAD (7-aminoactinomycin D, FUJIFILM Wako Pure Chemical Corp.) was added thereto, and a mean of PE signals of a 7-AAD-negative cell population was measured as an index for a receptor level on cell membranes using a flow cytometry system (Becton, Dickinson and Company). In each experiment run, a mean of PE signals was determined in the same manner as above by using cells expressing a FLAG-M2 acetylcholine receptor as a positive control (PC) and cells expressing no receptor as a negative control (NC). Normalization was performed with the NC PE signal defined as 0% and the PC PE signal defined as 100%. The PE signals (%) of various olfactory receptors were illustrated as membrane expression levels (Cell surface expression).

### 4) Luciferase Assay

[0331] The medium was removed from the cultures prepared in 2), and 75 μL of a test substance solution with a predetermined concentration prepared with a fresh medium was added thereto. The cells were cultured for 4 hours in a CO₂ incubator and the luciferase gene was sufficiently expresses in the cells. Luciferase activity was measured using Dual-Glo™ luciferase assay system (Promega Corp.) in accordance with the operation manual of the product. A luminescence value derived from firefly luciferase induced by test substance stimulation in each well of the 96-well plate was divided by a luminescence value derived from Renilla luciferase to calculate a signal, which was then used in analysis. The signal under each transfection condition was normalized with the signal under a stimulation-free condition defined as 0% and the signal by stimulation with 30 μM forskolin defined as 100%, and used as a response (%) in analysis.

### 5) Results

### (i) Consensus Design of Olfactory Receptor

[0332] First, 9 types of olfactory receptors (OR2A25, OR2T11, OR2W1, OR4Q3, OR4S2, OR6Y1, OR7D4, OR7A17, and OR11H4) already associated with ligands were selected and tested for their consensus design. The selection of receptors whose ligands are known is important because an assessment approach using ligand responsiveness as an index can be adopted even if a membrane expression level is improved in a range that cannot be experimentally detected.

[0333] Next, the following 3 types were selected as to evolutionary ranges where homologous genes are targeted to determine consensus amino acids for the selected olfactory receptors: (a) Primate ortholog=primate orthologs, (b) Primate ortholog/paralog=primate orthologs and the most related paralog, and (c) Ortholog=orthologs.

[0334] Table 6 shows the number of amino acid substitutions introduced for preparing a consensus olfactory receptor as to each olfactory receptor, the number of reference genes (the total number of the original olfactory receptor gene and the identified primate orthologs, primate orthologs and most related paralog, or orthologs), and the minimum homology thereamong. The numbers within the parentheses in the number of reference genes in (c) represent the number of primate orthologs among the reference genes. As a result of designing consensus olfactory receptors for the 9 olfactory receptors, the number of substitutions introduced to the original human olfactory receptor (307 amino acids on average) was 9.3 amino acids on average in the method (a), whereas the number of substitutions was increased to 27.1 and 19.9 amino acids on average in (b) and (c), respectively. Thus, consensus among more diverse genes was reflected. In all the methods, a large number of homologous genes were used for determining consensus amino acids in comparison with 10 genes in Non Patent Literature 2 except for 7 genes of primate orthologs of OR7A17 found to have no increase in membrane expression.

TABLE 6

| | (a) | | | (b) | | | (c) | | | |
|---|---|---|---|---|---|---|---|---|---|---|
| | The number | The | | The number | The | | The number | The | | |
| | of amino | number of | | of amino | number of | | of amino | number of | | |
| | acid | reference | Minimum | acid | reference | Minimum | acid | reference | | Minimum |
| | substitutions | genes | homology | substitutions | genes | homology | substitutions | genes | | homology |
| 2A25 | 10 | 18 | 82 | 33 | 38 | 79 | 25 | 70 | (17) | 74 |
| 2T11 | 10 | 16 | 78 | 75 | 45 | 69 | 14 | 95 | (13) | 83 |
| 2W1 | 11 | 19 | 87 | 39 | 50 | 61 | 19 | 192 | (18) | 61 |
| 4Q3 | 7 | 24 | 87 | 10 | 44 | 58 | 22 | 133 | (24) | 58 |
| 4S2 | 7 | 23 | 96 | 26 | 47 | 61 | 14 | 250 | (22) | 66 |
| 6Y1 | 10 | 26 | 87 | 7 | 48 | 58 | 13 | 177 | (25) | 66 |
| 7A17 | 4 | 8 | 77 | 20 | 50 | 77 | 25 | 146 | (43) | 77 |
| 7D4 | 13 | 36 | 89 | 20 | 50 | 70 | 27 | 242 | (32) | 74 |
| 11H4 | 12 | 24 | 88 | 14 | 44 | 68 | 20 | 127 | (23) | 78 |
| Average | 9.3 | 21.6 | 85.7 | 27.1 | 46.2 | 66.8 | 19.9 | 170.7 | (24.1) | 70.8 |

### (ii) Increase in Membrane Expression Level by Consensus Design

[0335] As a result of analysis using flow cytometry, all the 9 types of olfactory receptors markedly increased a membrane expression level by any of the 3 types of consensus design methods (FIG. 1 and Table 7). In other words, the possibility was indicated that the application of all the 3 types of consensus design methods can increase the membrane expression levels of 100% olfactory receptors in terms of probability. The number of olfactory receptors having increased average membrane expression level in comparison with the original human olfactory receptor was 7 (approximately 78%) in the method (a) Primate ortholog, 8 (approximately 89%) in the method (b) Primate ortholog/paralog, and 9 (100%) in the method (c) Ortholog. Thus, the possibility was found that these methods are more versatile than the approach of Non Patent Literature 2 with a success rate of one out of 3 (approximately 33%) in response analysis. In the consensus olfactory receptor group which exhibited increase in membrane expression level, the consensus design was not necessarily introduced at a common amino acid site, revealing that an amino acid site for the consensus design differs depending on the type of a receptor.

TABLE 7

| | | | | | (b) Primate | | | |
|---|---|---|---|---|---|---|---|---|
| | Human | | (a) Primate ortholog | | ortholog/paralog | | (c) Ortholog | |
| | Membrane | | Membrane | | Membrane | | Membrane | |
| | expression | | expression | | expression | | expression | |
| | level (%) | SEM | level (%) | SEM | level (%) | SEM | level (%) | SEM |
| 2A25 | 0.33 | 0.38 | 6.00 | 0.00 | 1.67 | 0.19 | 32.00 | 2.03 |
| 2T11 | −0.33 | 0.19 | 16.67 | 0.69 | 1.67 | 0.19 | 6.67 | 0.38 |
| 2W1 | 9.00 | 0.00 | 15.00 | 0.67 | 4.33 | 1.92 | 33.67 | 1.26 |
| 4Q3 | 0.67 | 0.19 | 11.33 | 0.19 | 8.00 | 0.33 | 13.33 | 0.51 |
| 4S2 | 2.33 | 0.38 | 1.00 | 0.33 | 46.00 | 0.33 | 3.33 | 0.19 |
| 6Y1 | 2.67 | 0.19 | 21.67 | 1.07 | 5.67 | 0.38 | 37.67 | 0.69 |
| 7A17 | 0.66 | 0.19 | 0.56 | 0.33 | 1.05 | 0.00 | 2.64 | 0.19 |
| 7D4 | −0.33 | 0.18 | 1.00 | 0.17 | 7.00 | 0.19 | 0.67 | 0.27 |
| 11H4 | 0.33 | 0.38 | 7.33 | 0.77 | 2.33 | 0.19 | 5.00 | 0.33 |

(iii) Improvement in Odor Responsiveness by Consensus Design

[0336] Next, in order to test whether improvement in membrane expression level would lead to higher sensitivity as odor responsiveness, ligand responsiveness was measured as to each receptor (FIG. 1). As a result, the following two points were found: when the membrane expression level is improved by the consensus design, the responsiveness is enhanced in almost all cases. The degree of improvement in membrane expression level does not bear a simple proportionate relationship with the degree of elevation in responsiveness. If the membrane expression level is improved even slightly, the responsiveness may be sufficiently improved. In the latter case, elevation in ligand responsiveness was found in association with increase in membrane expression level by the consensus design, as in 2T11, 6Y1, and 11H4, for example. On the other hand, no elevation in ligand responsiveness was found in some cases even if the membrane expression level was increased by the consensus design in comparison with the original human receptor, as in 2W1. The original human OR2W1 may exhibit a sufficient membrane expression level in itself and have no need for intracellular signal amplification even if the membrane expression level is further increased. Furthermore, the ligand responsiveness was sufficiently elevated in some cases even if the membrane expression level was slightly increased in comparison with the original human receptor, as in the consensus receptor of (b) Primate ortholog/paralog of 2A25 and the consensus receptor of (c) Ortholog of 7D4.

### (iv) Change in Ligand Selectivity by Consensus Design

[0337] An approach of introducing amino acid alteration, such as consensus design, might change a ligand binding site of the original olfactory receptor and consequently cause inherent odor responsiveness to be no longer observed.

[0338] Accordingly, among the 9 types of olfactory receptors selected this time, 5 types of receptors, 2A25, 2T11, 2W1, 11H4, and 7D4, found to have a plurality of agonists were examined for whether or not the consensus design of (a), (b), or (c) would change the ranking of affinity for 2 types of agonists (FIG. 2). All the consensus design methods were found to maintain the same ranking of affinity as that of the original receptor. It was revealed that, for example, 2A25 responded to geraniol at a lower concentration in comparison with geranyl formate, whereas its response selectivity was maintained in 3 patterns of consensus receptors.

[0339] In order to further test the possibility that the consensus design would change ligand selectivity, the test was conducted using known agonists themselves and many structurally similar substances thereof (Table 8) to examine whether or not the consensus design would change the ranking of responsiveness (FIG. 3). As a result, for all the olfactory receptors, an odorant which caused the highest response of the original human receptor caused the highest responses of the consensus receptors. In addition, no case was found where the consensus design canceled a response to an odorant to which the original human receptor responded. It can therefore be understood that the ligand selectivity is generally maintained. A plurality of cases, such as the case of 6Y1, were obtained where when the membrane expression level was increased by the consensus design, the consensus design was found to cause a response to an odorant to which the original human receptor did not respond. Although this result seems like a result brought about by change in ligand selectivity, it can be considered in reality that elevation in overall responsiveness enabled evaluation of a response to a ligand to which the original olfactory receptor was able to respond on olfactoryneurons. In fact, 6Y1 responds to diacetyl of odorant #5, as disclosed in Non Patent Literature 2, and this result is reasonable in well explaining an olfactory event measured by sensory evaluation (the gene differing between persons who strongly perceive odor of diacetyl and persons who weakly perceive odor of diacetyl is 6Y1). This demonstrated that an odorant for which response measurement was attained for the first time by the consensus design did not reflect a mere background and rather correctly reflected a human sense of smell. This will also be further supported by Examples mentioned below.

[0340] On the other hand, as for 7A17, odorant #6 caused a larger response of the original human receptor in comparison with odorant #4. However, when the consensus design was applied by the method (c) Ortholog, a plurality of cases, such as a tendency that reversed the ranking, were found where the response selectivity was not completely identical. However, such change in ligand selectivity in association with increase in membrane expression level is probably reasonable, as reported in preceding studies. For example, the report of Zhuang et al. (J Biol Chem. 2007 May 18; 282 (20): 15284-93) discloses that as a result of analyzing change in ligand selectivity at varying expression levels of the same olfactory receptor on cultured cell membranes, the change was found. The reasonability of the change has been discussed by quoting the preceding finding that in G protein-coupled receptors including olfactory receptors, their responses to, particularly, ligands having weak agonistic activity, can be detected with markedly high sensitivity when intracellular signals are amplified in association with increase in membrane expression level. Importantly, it has been considered that since olfactory receptors are highly expressed on olfactory neurons, ligand selectivity exhibited by the olfactory receptors placed under a high-expression condition on cultured cell membranes also reflects the physiological properties of the olfactory receptors.

TABLE 8

| | 4Q3 | 7D4 | 6Y1 | 11H4 | 7A17 |
|---|---|---|---|---|---|
| No | Odorant | Odorant | Odorant | Odorant | Odorant |
| 1 | geranyl propionate | 8-drimanol | acetone | geranyl propionate | okoumal |
| 2 | phenyl ethyl formate | ambrinol | butyric acid | l-citronellyl acetate | ysamber K |
| 3 | skatole | muscone | butanol | phenoxy ethanol iso-butyrate | ambrinol |
| 4 | benzophenone | amberketal | 2-peotanone | phenyl ethyl acetate | 8-drimanol |
| 5 | phenylethylacetate | androstadienone | diacetyl | phenyl ethyl alcohol | ambroxan |
| 6 | phenoxy ethanol i-butyrate | androstenone | acetoin | phenyl ethyl formate | iso E super |
| 7 | l-citronellyl acetate | okoumal | acetic acid | phenyl ethyl salicylate | amberketal |
| 8 | isovaleric acid | civettone | 2-butanone | skatole | civettone |
| 9 | l-citronellol | ysamber K | 1-propanol | isovaleric acid | muscone |
| 10 | | Iso E super | | l-citronellol | |

| | 4S2 | 2W1 | 2T11 | 2A25 |
|---|---|---|---|---|
| No | Odorant | Odorant | Odorant | Odorant |
| 1 | dibutyl sulfide | lyral | furfuryl methylsulfide | isovaleric acid |
| 2 | cis-3-hexenol | eugenol | dibutyl sulfide | phenoxy ethanol iso-butyrate |
| 3 | cis-2-pentenol | benzyl saficilate | methyl mercaptan | geranyl formate |
| 4 | sulfide allyl methyl | citronellol | furfuryl mercaptan | phenyl ethyl salicylate |
| 5 | furfuryl methylsulfide | 1-hexanol | tert butyl mercaptan | geraniol |
| 6 | methyl mercaptan | carvone | dimethyl disulfide | l-citronellol |
| 7 | dimethyl trisulfide | octanol | sulfide allyl methyl | geranyl propionate |
| 8 | trans-3-hexenol | benzyl acetate | dimethyl trisulfide | l-citronellyl acetate |
| 9 | dimethyl sulfide | citral | dimethyl sulfide | phenyl ethyl formate |
| 10 | furfuryl mercaptan | cinnamic aldehyde | | skatole |
| 11 | | limonene | | |
| 12 | | geraniol | | |
| 13 | | linalool | | |
| 14 | | benzyl alcohol | | |
| 15 | | lilial | | |
| 16 | | diacetyl | | |

### Example 2: Effectiveness of Consensus Design for Olfactory Receptor Never Before Possible to Functionally Analyze—1

[0341] The studies described above were carried out as to olfactory receptors which can be expressed on membranes of cultured cells and are possible to functionally analyze, for example, olfactory receptors whose ligands have been identified. The consensus design according to the present invention was tested for the actual degree of its effectiveness for yet-to-be analyzed olfactory receptors.

[0342] Non Patent Literature 2 and the report of Eriksson et al. (Flavour 1: 22 (2012)) disclose that comparative genome analysis was carried out as to a population containing individuals differing in perception of each individual odor, thereby selecting candidates of an olfactory receptor responsible for sensitivity to the odorant. In other words, although these reports have identified ligand candidate substances for olfactory receptors, responsiveness to the ligand candidate substances has not yet been demonstrated as to 34 types of olfactory receptors (human olfactory receptors in Table 10). As reasons for the unsuccessful response measurement, the possibilities have been pointed out that these 34 types of olfactory receptors were false positive i.e., correct ligand substances could not be identified, in the first place; and although correct ligand substances could be identified, responses thereto could not be detected due to nonefficient membrane expression in cultured cells. Accordingly, the consensus design was applied to these 34 types of olfactory receptors by the method (c) Ortholog for the olfactory receptors other than 11H1 and by the method (d) for 11H1 among the 3 patterns, (a) to (c), described above.

[0343] In the consensus design by the method of (d), paralogs were identified which had higher homology to an olfactory receptor of interest and permitted identification of at least 11 types of orthologs. An ortholog group of the paralogs was selected. When the olfactory receptor of interest was human OR11H1, the identification of the ortholog group was attempted in the same manner as in the case of Example 1 (c) except that the amino acid sequence of human OR11H1 (NP_001005239) was set to a query sequence. However, only 6 genes were selected as the ortholog group. Accordingly, human OR11H12 (NP_001013372.1) was focused on as a paralog having high homology to human OR11H1 from among top 250 homologous genes searched for by setting the amino acid sequence of human OR11H1 to a query sequence. An ortholog group of OR11H12 having high homology to human OR11H1 was identified, and 90 genes were selected as orthologs. The amino acid sequences of a total of 98 genes consisting of these 90 genes plus human OR11H1, 6 genes of orthologs of human OR11H1, and human OR11H12 (Table 9) were subjected to alignment analysis and consensus amino acid identification in the same manner as in Example 1 for the consensus design of the olfactory receptors.

TABLE 9

| | |
|---|---|
| 1 | NP_001005239.1 |
| 2 | NP_001013372.1 |
| 3 | XP_016783170.1 |
| 4 | XP_018866080.2 |
| 5 | XP_002833829.1 |
| 6 | XP_027687761.1 |
| 7 | XP_001141680.2 |
| 8 | XP_014199111.1 |
| 9 | XP_012608311.2 |
| 10 | XP_012504714.1 |
| 11 | XP_001504682.4 |
| 12 | XP_007956255.1 |
| 13 | XP_008531921.1 |
| 14 | XP_003423385.1 |
| 15 | XP_014700051.1 |
| 16 | XP_020756322.1 |
| 17 | XP_029808074.1 |
| 18 | XP_004456757.3 |
| 19 | XP_027785489.1 |
| 20 | XP_005685482.2 |
| 21 | XP_026267801.1 |
| 22 | XP_015336369.1 |
| 23 | XP_004421406.1 |
| 24 | XP_013221191.1 |
| 25 | XP_006883328.1 |
| 26 | XP_004694755.1 |
| 27 | XP_004865164.2 |
| 28 | XP_019286005.1 |
| 29 | XP_004584687.1 |
| 30 | XP_010807442.3 |
| 31 | XP_020955667.1 |
| 32 | XP_006877203.1 |
| 33 | XP_010831734.1 |
| 34 | XP_027408653.1 |
| 35 | XP_005908917.2 |
| 36 | XP_005908916.1 |
| 37 | XP_023111945.1 |
| 38 | XP_022377345.1 |
| 39 | XP_007091476.2 |
| 40 | XP_008837990.2 |
| 41 | XP_008682196.1 |
| 42 | XP_027408592.1 |
| 43 | XP_025775053.1 |
| 44 | XP_004391087.1 |
| 45 | XP_014921853.1 |
| 46 | XP_020756331.1 |
| 47 | XP_032712983.1 |
| 48 | XP_034850470.1 |
| 49 | XP_019823487.1 |
| 50 | XP_002690799.1 |
| 51 | XP_030176066.1 |
| 52 | XP_004010989.4 |
| 53 | XP_004609780.1 |
| 54 | XP_026346423.1 |
| 55 | XP_004781801.1 |
| 56 | XP_010604553.1 |
| 57 | XP_021551384.1 |
| 58 | XP_007538130.1 |
| 59 | XP_032273398.1 |
| 60 | XP_001927243.3 |
| 61 | XP_008708659.1 |
| 62 | XP_010948004.1 |
| 63 | XP_012906255.1 |
| 64 | XP_006191275.2 |
| 65 | XP_010995612.1 |
| 66 | XP_030881029.1 |
| 67 | XP_019823488.1 |
| 68 | XP_032197647.1 |
| 69 | XP_023581563.1 |
| 70 | XP_006052449.2 |
| 71 | XP_013363999.1 |
| 72 | XP_006075641.2 |
| 73 | XP_004670211.1 |
| 74 | XP_017909295.1 |
| 75 | XP_006877224.1 |
| 76 | XP_025295049.1 |
| 77 | XP_022283407.1 |
| 78 | XP_006218179.1 |
| 79 | XP_025848063.1 |
| 80 | XP_027975244.1 |
| 81 | XP_027426141.1 |
| 82 | XP_011216635.3 |
| 83 | XP_020011212.1 |
| 84 | XP_006877225.1 |
| 85 | XP_025739510.1 |
| 86 | XP_019060578.2 |
| 87 | XP_017524110.1 |
| 88 | XP_004865143.2 |
| 89 | XP_006149489.2 |
| 90 | XP_006877223.1 |
| 91 | XP_012892248.1 |
| 92 | XP_006877222.1 |
| 93 | XP_030740791.1 |
| 94 | XP_023398216.1 |
| 95 | XP_019060577.1 |
| 96 | XP_003128838.2 |
| 97 | XP_023398176.1 |
| 98 | XP_002690724.2 |

[0344] Table 10 shows the number of reference genes (the total number of the original olfactory receptor gene and the identified orthologs) used for preparing the consensus olfactory receptors. Among the olfactory receptors, 2W3, 2Y1, 3A2, 4C15, 4D5, 4D6, 4F15, 10D3, 10Q1, 11H1, and 13G1 were tested at n=4 while the other olfactory receptors were tested at n=3. As a result of measuring expression levels of these receptors on cell membranes, increase in average value was found in 29 (approximately 85%) receptors (FIG. 4 and Table 11). This suggested that the consensus design enables functional analysis on many receptors never before possible to analyze. As for the remaining 5 receptors having no increase in membrane expression level, their expression levels may be increased by applying the consensus design (a) or (b).

TABLE 10

| | The number of |
|---|---|
| | reference |
| | genes |
| 2AG1 | 130 |
| 2AG2 | 135 |
| 2D2 | 196 |
| 2D3 | 248 |
| 2T10 | 36 |
| 2W3 | 227 |
| 2Y1 | 103 |
| 3A2 | 134 |
| 4A16 | 76 |
| 4C15 | 245 |
| 4D5 | 133 |
| 4D6 | 135 |
| 4F15 | 155 |
| 4K15 | 186 |
| 5A2 | 112 |
| 5C1 | 133 |
| 5W2 | 233 |
| 6A2 | 174 |
| 6B2 | 182 |
| 6C1 | 245 |
| 10A2 | 97 |
| 10A4 | 130 |
| 10A5 | 133 |
| 10D3 | 89 |
| 10Q1 | 246 |
| 10R2 | 250 |
| 10Z1 | 131 |
| 11H1 | 98 |
| 13C8 | 136 |
| 13G1 | 205 |
| 14J1 | 243 |
| 52A4 | 19 |
| 56A1 | 102 |
| 56A4 | 197 |

TABLE 11

| | Original | | Consensus | |
|---|---|---|---|---|
| | Membrane | | Membrane | |
| | expression level | | expression level | |
| | (%) | SEM | (%) | SEM |
| 2AG1 | 0.18 | 0.05 | 3.83 | 0.24 |
| 2AG2 | 0.44 | 0.08 | 2.89 | 0.17 |
| 2D2 | 0.75 | 0.25 | 1.74 | 0.19 |
| 2D3 | −0.09 | 0.05 | 3.80 | 0.19 |
| 2W3 | 2.73 | 0.12 | 5.28 | 0.20 |
| 2Y1 | 2.19 | 0.21 | 16.42 | 0.74 |
| 3A2 | −0.02 | 0.03 | 12.41 | 0.73 |
| 4A16 | 0.88 | 0.25 | 16.98 | 0.94 |
| 4C15 | 0.62 | 0.19 | 17.02 | 1.86 |
| 4D5 | 1.61 | 0.18 | 2.65 | 0.50 |
| 4D6 | 0.70 | 0.04 | 1.37 | 0.11 |
| 4F15 | 0.38 | 0.08 | 5.92 | 0.56 |
| 4K15 | 0.74 | 0.35 | 24.14 | 1.07 |
| 5C1 | 0.52 | 0.18 | 13.63 | 0.51 |
| 5A2 | 0.01 | 0.06 | 1.60 | 0.09 |
| 5W2 | −0.08 | 0.08 | 10.59 | 0.80 |
| 6A2 | 0.09 | 0.05 | 9.64 | 0.34 |
| 6B2 | 1.81 | 0.39 | 21.19 | 0.94 |
| 6C1 | −0.07 | 0.06 | 0.20 | 0.14 |
| 10A2 | −0.06 | 0.06 | 7.08 | 0.14 |
| 10A4 | 0.94 | 0.04 | 2.21 | 0.18 |
| 10D3 | 0.33 | 0.08 | 1.10 | 0.40 |
| 10Q1 | 0.28 | 0.07 | 19.84 | 0.27 |
| 10Z1 | 0.41 | 0.15 | 38.16 | 0.79 |
| 11H1 | 0.22 | 0.05 | 25.34 | 1.87 |
| 13C8 | 0.43 | 0.11 | 2.00 | 0.31 |
| 13G1 | 0.44 | 0.07 | 17.96 | 1.13 |
| 52A4 | 0.31 | 0.20 | 0.54 | 0.21 |
| 56A4 | 0.01 | 0.08 | 0.42 | 0.16 |

[0345] Subsequently, whether increase in membrane expression level by the consensus design would actually bring about success in response measurement was tested. Non Patent Literature 2 has reported 6B2, 5C1, and 10D3 as olfactory receptors related to sensitivity to isobutyraldehyde, citral, and isoeugenol, respectively. The approach of Non Patent Literature 2 has failed to express these olfactory receptors in cultured cells and to demonstrate their responsiveness to the corresponding odorants. This time, the consensus design by the method of (c) Ortholog was applied to these olfactory receptors, and response analysis was carried out. As a result, the responses became possible to detect for the first time by the consensus design in some cases (FIG. 5).

[0346] Importantly, 6B2 is a receptor reported to fail response analysis to isobutyraldehyde in Non Patent Literature 2, though its consensus design was attempted in 10 mammals. The consensus design according to the present invention enabled analysis of 6B2 as a method having higher versatility than that of the previous report.

[0347] Likewise, the report of Eriksson et al. (Flavour 1: 22 (2012)) has identified 8 olfactory receptor candidates (2AG2, 2AG1, 6A2, 10A2, 10A5, 10A4, 2D2, and 2D3) which explain difference in perception of coriander-derived odor among individuals. However, the approach of this report has failed functional analysis to actually identify any receptor as a receptor for a coriander-derived odorant. Accordingly, in the present research, the consensus design of (c) Ortholog was applied to these 8 receptors, and response analysis was carried out on major aroma components ((E)-2-decenal and (E)-2-dodecenal) (FIG. 6). The obtained results revealed for the first time that 10A2 and 10A4 can recognize these odorants by the application of the consensus design.

### Example 3: Effectiveness of Consensus Design for Olfactory Receptor Never Before Possible to Functionally Analyze—2

[0348] Whether responsiveness coinciding with difference among individuals in sensory evaluation would be obtained was tested by applying the consensus design (c) to each human olfactory receptor newly identified in FIGS. 5 and 6, and then introducing an amino acid sequence reported to have difference among individuals (FIG. 7).

[0349] For example, it has been reported for OR10A2 that the frequency of appearance of an amino acid sequence registered as NP_001004460.1 is 68% in a population, whereas an amino acid sequence having three mutations, H43R, H207R, and K258T, appears with a frequency of 32% (the frequencies of appearance are from the 1000 genomes project phase 3 allele frequencies). Among these three mutations, H207R is also a consensus amino acid identified by the method (c). These two types of amino acid sequences found in a population are each presumed to bring about change in responsiveness to major aroma components ((E)-2-decenal and (E)-2-dodecenal) of coriander and consequently bring about difference in human perception of coriander flavor as unpleasant soap-like one or not. As a result of an experiment, the variant of H43R, H207R, and K258T was found to have markedly low responsiveness to the aroma components, as expected. The olfactory receptor 10A4 having lower responsiveness to the aroma components than that of 10A2 has also been reported to have a R262Q variant which appears with a frequency of 31% in a population. However, this variant brought about no change in responsiveness to the aroma components. Thus, 10A2 became possible to identify as a receptor which explains difference in perception of coriander flavor among individuals, for the first time by the application of the consensus design method.

[0350] Likewise, 6B2 is found to have a variant of R122C and C179R with a frequency of 1% in a population (test participants in Non Patent Literature 2), and according to Non Patent Literature 2, this population cannot strongly perceive odor of isobutyraldehyde having a low concentration. When the R122C and C179R mutations were introduced to the consensus olfactory receptor 6B2 so as to coincide with this difference among individuals in sensory evaluation, it was confirmed that the responsiveness to isobutyraldehyde was markedly reduced.

[0351] 5C1 is found to have a N5K variant with a frequency of 1% in a population (1000 genomes project phase 3 allele frequencies), and according to Non Patent Literature 2, this population cannot strongly perceive odor of citral having a low concentration. When the N5K mutation was introduced to the consensus olfactory receptor 5C1 so as to coincide with this difference among individuals in sensory evaluation, it was confirmed that the responsiveness to citral was markedly reduced.

[0352] These results revealed that the consensus design method of the present invention is very effective for assessing a human sense of smell.

### Example 4: Applicable Range of Consensus Design Method—1

[0353] Olfactory receptor gene families are a very highly diverse gene group, and the homology of olfactory receptor between different families falls below 40%. Thus, individual olfactory receptors can also be considered as totally different G protein-coupled receptors. Accordingly, a further test was conducted in order to clarify the general effectiveness of the consensus design method of the present invention for olfactory receptors, i.e., the applicable range of the consensus design method of the present invention. The test was conducted as to an olfactory receptor group other than the 9 types of Example 1 and the 34 types of Example 2 described above. Specifically, the consensus design by the method (c) Ortholog or (d) was applied to target olfactory receptors (58 types of human olfactory receptors in FIG. 8 and Table 12). The consensus design (c) was applied to the olfactory receptors other than OR2T7 and OR4F5, and the consensus design (d) was applied to OR2T7 and OR4F5.

[0354] As for OR7E24 among the olfactory receptors to which the consensus design (c) was applied, a consensus residue nearest to the N terminus was a consensus residue at a position corresponding to a C-terminal side of the N terminus of the original human OR7E24 serving as a reference, and was not a methionine residue. Therefore, if a consensus residue on an N-terminal side of a consensus residue consisting of a methionine residue positioned nearest to the N terminus is changed to the absence of a consensus residue, the full-length of the amino acid sequence of the resulting consensus receptor is shorter by 10% or more than the full-length of the amino acid sequence of the original human OR7E24. Hence, instead of this method, the consensus residue nearest to the N terminus was substituted by methionine.

[0355] In the consensus design by the method (d), when the olfactory receptor of interest was human OR4F5, the identification of an ortholog group was attempted in the same manner as in the case of Example 1 (c) except that the amino acid sequence of human OR4F5 (NP_001005484.2) was set to a query sequence. However, no ortholog of OR4F5 was identified from other organism species. Accordingly, human OR4F4 (NP_001004195.2) was focused on as a paralog having high homology to human OR4F5 from among top 250 homologous genes searched for by setting the amino acid sequence of human OR4F5 to a query sequence. An ortholog group of OR4F4 having high homology to human OR4F5 was identified, and 99 genes were selected as orthologs. The amino acid sequences of a total of 101 genes consisting of these 99 genes plus human OR4F5 and human OR4F4 were subjected to alignment analysis and consensus amino acid identification in the same manner as in Example 1 for the consensus design of the olfactory receptors.

[0356] When the olfactory receptor of interest was human OR2T7, the identification of an ortholog group was attempted in the same manner as in the case of Example 1 (c) except that the amino acid sequence of human OR2T7 (NP_001372981.1) was set to a query sequence. However, only 5 genes were selected as the ortholog group. Accordingly, human OR2T27 was focused on as a paralog having the highest homology to human OR2T7 from among top 250 homologous genes searched for by setting the amino acid sequence of human OR2T7 to a query sequence. As a result of identifying an ortholog group, 100 genes were selected as the ortholog group. The amino acid sequences of a total of 107 genes consisting of these 10⁵ genes plus human OR2T7 and human OR2T27 were subjected to alignment analysis and consensus amino acid identification in the same manner as in Example 1 for the consensus design of the olfactory receptors.

[0357] FIG. 8 and Table 12 show cases where the membrane expression level was increased by the method (c) or (d). Table 13 shows the number of reference genes (the total number of the original olfactory receptor gene and the identified orthologs or orthologs and paralogs) used for preparing the consensus olfactory receptors. The results of FIG. 8 and Table 12 revealed that the consensus design method of the present invention can increase membrane expression levels of an exceedingly large number of olfactory receptors.

TABLE 12

| | Original | | Consensus | |
|---|---|---|---|---|
| | Membrane | | Membrane | |
| | expression level | | expression level | |
| | (%) | SEM | (%) | SEM |
| 2B11 | 1.22 | 0.19 | 8.86 | 0.23 |
| 2C3 | 0.60 | 0.02 | 6.62 | 0.15 |
| 2G2 | −0.08 | 0.01 | 3.39 | 0.08 |
| 2G3 | 0.14 | 0.03 | 1.22 | 0.05 |
| 2L2 | 0.18 | 0.05 | 10.16 | 0.58 |
| 2L3 | 5.61 | 0.35 | 7.42 | 0.43 |
| 2L5 | 0.13 | 0.05 | 2.34 | 0.11 |
| 2L8 | 0.57 | 0.09 | 7.55 | 0.40 |
| 2L13 | 0.21 | 0.04 | 16.71 | 0.50 |
| 2M2 | 0.07 | 0.02 | 0.34 | 0.04 |
| 2M4 | −0.01 | 0.02 | 4.33 | 0.05 |
| 2T1 | 0.13 | 0.04 | 7.09 | 0.24 |
| 2T4 | 0.11 | 0.02 | 3.05 | 0.24 |
| 2T5 | 1.60 | 0.69 | 19.52 | 0.59 |
| 2T6 | 0.54 | 0.09 | 3.10 | 0.20 |
| 2T7 | 0.04 | 0.0 | 10.57 | 0.78 |
| 2T8 | 0.24 | 0.07 | 6.16 | 0.31 |
| 2T12 | 0.79 | 0.05 | 2.79 | 0.22 |
| 2T27 | 0.44 | 0.14 | 24.05 | 1.00 |
| 2T29 | 1.45 | 0.65 | 14.34 | 0.22 |
| 2T33 | 0.46 | 0.05 | 15.32 | 0.41 |
| 2T34 | 3.74 | 1.21 | 6.44 | 1.26 |
| 2T35 | −0.19 | 0.02 | 1.63 | 0.36 |
| 2AK2 | 0.89 | 0.06 | 7.87 | 0.63 |
| 4D10 | 0.07 | 0.06 | 2.73 | 0.21 |
| 4E2 | 1.01 | 0.22 | 21.22 | 1.67 |
| 4F5 | 0.27 | 0.06 | 11.99 | 0.60 |
| 4K1 | 0.32 | 0.02 | 1.27 | 0.11 |
| 4K2 | 0.69 | 0.09 | 12.06 | 0.35 |
| 4K5 | 0.11 | 0.0 | 0.44 | 0.03 |
| 4K17 | 0.13 | 0.0° | 9.09 | 0.04 |
| 4L1 | 0.11 | 0.03 | 10.44 | 0.17 |
| 4M1 | 0.57 | 0.03 | 2.25 | 0.01 |
| 4N2 | 0.05 | 0.07 | 2.61 | 0.03 |
| 4N5 | 0.87 | 0.02 | 1.69 | 0.08 |
| 5A1 | 1.06 | 0.08 | 9.77 | 0.38 |
| 6F1 | 0.10 | 0.04 | 5.52 | 0.09 |
| 6J1 | 0.05 | 0.05 | 0.24 | 0.03 |
| 7A10 | 0.82 | 0.12 | 1.15 | 0.13 |
| 7C2 | 1.67 | 0.55 | 2.98 | 0.37 |
| 7G2 | 0.34 | 0.14 | 2.06 | 0.40 |
| 7G3 | 0.92 | 0.30 | 3.82 | 0.86 |
| 10G2 | 0.50 | 0.03 | 25.73 | 1.21 |
| 10J1 | 0.49 | 0.04 | 5.94 | 0.33 |
| 10J3 | 0.04 | 0.03 | 5.96 | 0.36 |
| 10K1 | 2.85 | 0.14 | 9.85 | 0.64 |
| 10K2 | 0.15 | 0.12 | 1.34 | 0.06 |
| 10T2 | 0.08 | 0.07 | 9.83 | 0.77 |
| 10X1 | 0.18 | 0.04 | 1.23 | 0.18 |
| 11G2 | 0.02 | 0.05 | 25.19 | 2.95 |
| 11H6 | 0.08 | 0.05 | 0.36 | 0.09 |
| 11H7 | 0.25 | 0.05 | 15.18 | 0.80 |
| 11L1 | 1.06 | 0.24 | 4.26 | 1.20 |
| 14A2 | −0.01 | 0.0° | 0.27 | 0.07 |
| 14A16 | −0.13 | 0.02 | 1.33 | 0.37 |
| 14C36 | 0.05 | 0.01 | 5.35 | 0.22 |
| 14K1 | 0.48 | 0.02 | 1.84 | 0.09 |
| 7E24 | 0.48 | 0.17 | 1.47 | 0.50 |

TABLE 13

| | The number of |
|---|---|
| | reference genes |
| 2B11 | 201 |
| 2C3 | 115 |
| 2G2 | 138 |
| 2G3 | 69 |
| 2L2 | 45 |
| 2L3 | 38 |
| 2L5 | 56 |
| 2L8 | 113 |
| 2L13 | 215 |
| 2M2 | 12 |
| 2M4 | 77 |
| 2T1 | 127 |
| 2T4 | 60 |
| 2T5 | 192 |
| 2T6 | 121 |
| 2T7 | 107 |
| 2T8 | 127 |
| 2T12 | 23 |
| 2T27 | 103 |
| 2T29 | 179 |
| 2T33 | 98 |
| 2T34 | 87 |
| 2T35 | 134 |
| 2AK2 | 185 |
| 4D10 | 103 |
| 4E2 | 99 |
| 4F5 | 101 |
| 4K1 | 209 |
| 4K2 | 213 |
| 4K5 | 128 |
| 4K17 | 56 |
| 4L1 | 226 |
| 4M1 | 157 |
| 4N2 | 118 |
| 4N5 | 116 |
| 5A1 | 197 |
| 6F1 | 107 |
| 6J1 | 111 |
| 7A10 | 86 |
| 7C2 | 141 |
| 7G2 | 144 |
| 7G3 | 134 |
| 10G2 | 230 |
| 10J1 | 241 |
| 10J3 | 148 |
| 10K1 | 147 |
| 10K2 | 117 |
| 10T2 | 188 |
| 10X1 | 214 |
| 11G2 | 249 |
| 11H6 | 154 |
| 11H7 | 130 |
| 11L1 | 210 |
| 14A2 | 223 |
| 14A16 | 107 |
| 14C36 | 250 |
| 14K1 | 120 |
| 7E24 | 106 |

### Example 5: Applicable Range of Consensus Design Method—2

[0358] The applicability of the consensus design method was tested as to an olfactory receptor group other than the 9 types of Example 1, the 34 types of Example 2, and the 58 types of Example 4 described above. Specifically, the consensus design by the method (c) Ortholog or (d) was applied to target olfactory receptors (156 types of human olfactory receptors in Tables 14 and 15). The consensus design (c) was applied to the olfactory receptors other than OR1D4, OR3A3, OR11H2, OR51A2, and OR52E6, and the consensus design (d) was applied to OR1D4, OR3A3, OR11H2, OR51A2, and OR52E6.

[0359] As for OR9K2 among the olfactory receptors to which the consensus design (c) was applied, the full-length of the amino acid sequence of the consensus receptor was increased by 10% or more on an N-terminal side than the full-length of the amino acid sequence of the original human olfactory receptor. Therefore, an N-terminal structure of the original human olfactory receptor was maintained as it was in the amino acid sequence of the consensus receptor.

[0360] Tables 14 and 15 show cases where the membrane expression level was increased by the method (c) or (d) (n=3). Table 16 shows the number of reference genes (the total number of the original olfactory receptor gene and the identified orthologs or orthologs and paralogs) used for preparing the consensus olfactory receptors. The results of Tables 14 and 15 revealed that the consensus design method of the present invention can increase membrane expression levels of an exceedingly large number of olfactory receptors.

TABLE 14

| | Original | | Consensus | |
|---|---|---|---|---|
| | Membrane | | Membrane | |
| | expression level | | expression level | |
| | (%) | SEM | (%) | SEM |
| 1B1 | −0.01 | 003 | 0.34 | 0.04 |
| 1D2 | 1.91 | 0.11 | 7.29 | 0.28 |
| 1D4 | 0.11 | 0.03 | 0.76 | 0.05 |
| 1E2 | 0.04 | 0.05 | 0.31 | 0.07 |
| 1F1 | 0.19 | 0.03 | 4.81 | 0.18 |
| 1G1 | 0.17 | 0.03 | 2.56 | 0.13 |
| 1I1 | 2.61 | 1.20 | 22.72 | 0.57 |
| 1J1 | 0.23 | 0.03 | 13.30 | 0.81 |
| 1J4 | 0.15 | 0.03 | 22.78 | 2.92 |
| 1K1 | 2.21 | 0.06 | 11.94 | 0.37 |
| 1L1 | 0.33 | 0.04 | 13.38 | 0.29 |
| 1L3 | 0.59 | 0.03 | 0.80 | 0.05 |
| 1L4 | 0.42 | 0.02 | 15.66 | 0.63 |
| 1L6 | −0.18 | 0.07 | 43.43 | 1.69 |
| 1L8 | 0.02 | 0.03 | 3.02 | 0.22 |
| 1M1 | 2.01 | 0.06 | 4.66 | 0.05 |
| 1Q1 | 0.35 | 0.03 | 18.47 | 0.05 |
| 1S1 | −0.07 | 0.02 | 3.99 | 0.12 |
| 1S2 | −0.10 | 0.02 | 0.02 | 0.03 |
| 2A1 | 0.32 | 0.08 | 59.91 | 0.63 |
| 2A5 | 0.30 | 0.03 | 22.72 | 0.53 |
| 2A7 | 0.39 | 0.04 | 0.96 | 0.06 |
| 2A14 | 1.32 | 0.34 | 5.87 | 0.26 |
| 2B2 | 0.22 | 0.12 | 1.18 | 0.14 |
| 2B3 | 0.54 | 0.15 | 0.70 | 0.14 |
| 2B6 | 0.18 | 0.07 | 1.20 | 0.14 |
| 2C1 | 1.92 | 0.10 | 29.81 | 0.77 |
| 2F1 | 0.16 | 0.05 | 1.03 | 0.09 |
| 2F2 | 0.27 | 0.03 | 0.39 | 0.02 |
| 2H1 | 0.24 | 0.05 | 11.71 | 0.16 |
| 2H2 | 0.30 | 0.02 | 1.66 | 0.10 |
| 2K2 | 0.04 | 0.04 | 0.54 | 0.04 |
| 2S2 | 0.50 | 0.05 | 9.22 | 0.30 |
| 2V1 | 0.33 | 0.05 | 2.45 | 0.10 |
| 2V2 | 0.38 | 0.07 | 3.25 | 0.38 |
| 2Z1 | −0.01 | 0.01 | 0.60 | 0.01 |
| 2AE1 | 0.47 | 0.02 | 15.68 | 1.10 |
| 2AP1 | 0.38 | 0.02 | 17.61 | 0.19 |
| 2AT4 | 0.06 | 0.01 | 0.41 | 0.03 |
| 3A1 | 0.12 | 0.01 | 42.79 | 0.32 |
| 3A3 | 0.09 | 0.04 | 38.28 | 1.01 |
| 4A5 | −0.13 | 0.03 | 11.42 | 0.16 |
| 4A15 | −0.14 | 0.02 | 0.49 | 0.01 |
| 4A47 | 0.06 | 0.01 | 0.42 | 0.00 |
| 4B1 | −0.08 | 0.03 | 1.69 | 0.04 |
| 4C3 | 0.48 | 0.09 | 37.94 | 0.54 |
| 4C6 | 0.19 | 0.03 | 27.20 | 0.25 |
| 4C11 | 0.05 | 0.03 | 6.08 | 0.22 |
| 4C12 | 0.40 | 0.10 | 7.42 | 0.16 |
| 4C16 | 0.15 | 0.03 | 2.48 | 0.16 |
| 4C46 | 0.46 | 0.03 | 8.06 | 0.27 |
| 4D1 | 0.35 | 0.04 | 4.41 | 0.13 |
| 4D2 | 0.17 | 0.03 | 2.69 | 0.12 |
| 4D9 | 0.00 | 0.01 | 12.89 | 0.18 |
| 4D11 | −0.01 | 0.01 | 20.11 | 0.23 |
| 4F17 | 0.07 | 0.01 | 0.25 | 0.02 |
| 4F21 | 0.28 | 0.02 | 1.78 | 0.11 |
| 4P4 | −0.02 | 0.01 | 0.99 | 0.02 |
| 4X1 | 0.03 | 0.01 | 2.47 | 0.06 |
| 4X2 | 0.34 | 0.01 | 20.63 | 0.25 |
| 5B2 | 0.06 | 0.01 | 0.70 | 0.01 |
| 5B12 | 0.25 | 0.05 | 9.64 | 0.22 |
| 5B17 | 0.05 | 0.00 | 0.55 | 0.03 |
| 5H1 | 0.22 | 0.09 | 1.68 | 0.03 |
| 5H2 | 1.90 | 0.00 | 24.30 | 0.52 |
| 5H6 | 1.78 | 0.05 | 3.56 | 0.12 |
| 5H14 | 0.61 | 0.03 | 1.53 | 0.11 |
| 5K3 | 0.39 | 0.09 | 2.32 | 0.19 |
| 5AK2 | 0.03 | 0.01 | 1.87 | 0.08 |
| 5AR1 | 0.72 | 0.29 | 21.76 | 0.25 |
| 5AS1 | 0.19 | 0.04 | 0.64 | 0.05 |
| 6B1 | 20.51 | 1.37 | 55.75 | 3.93 |
| 6B3 | 0.41 | 0.06 | 18.20 | 0.20 |
| 6C2 | 0.46 | 0.02 | 0.68 | 0.02 |
| 6C3 | 0.36 | 0.02 | 1.31 | 0.04 |
| 6C4 | 0.07 | 0.01 | 5.68 | 0.10 |
| 6C6 | 0.08 | 0.06 | 5.36 | 0.15 |
| 6C65 | 0.02 | 0.06 | 2.75 | 0.07 |
| 6C68 | 0.50 | 0.05 | 1.19 | 0.06 |
| 6C70 | 0.14 | 0.04 | 0.82 | 0.06 |

TABLE 15

| | Original | | Consensus | |
|---|---|---|---|---|
| | Membrane | | Membrane | |
| | expression level | | expression level | |
| | (%) | SEM | (%) | SEM |
| 6C74 | 0.02 | 0.05 | 3.73 | 0.12 |
| 6C75 | −0.07 | 0.04 | 2.61 | 0.07 |
| 6C76 | −0.05 | 0.03 | 1.92 | 0.09 |
| 6K3 | 0.10 | 0.06 | 20.73 | 0.51 |
| 6K6 | 0.06 | 0.03 | 7.09 | 0.31 |
| 6N2 | 0.75 | 0.06 | 2.37 | 0.18 |
| 8S1 | 0.05 | 0.06 | 1.50 | 0.10 |
| 9A2 | 0.24 | 0.04 | 0.40 | 0.05 |
| 9A4 | 0.22 | 0.05 | 0.70 | 0.06 |
| 10A3 | −0.02 | 0.03 | 11.16 | 0.33 |
| 10A7 | 0.11 | 0.05 | 0.73 | 0.11 |
| 10G6 | −0.05 | 0.03 | 2.50 | 0.20 |
| 10G9 | 0.19 | 0.03 | 1.60 | 0.04 |
| 10H1 | 2.03 | 0.02 | 20.05 | 0.24 |
| 10H2 | 2.77 | 0.09 | 23.43 | 0.40 |
| 10H3 | 0.15 | 0.03 | 1.68 | 0.05 |
| 10H4 | 0.13 | 0.02 | 0.52 | 0.06 |
| 10H5 | 1.40 | 0.06 | 7.87 | 0.13 |
| 10P1 | 0.44 | 0.05 | 9.57 | 0.07 |
| 10S1 | 0.06 | 0.03 | 19.03 | 0.36 |
| 10V1 | 0.00 | 0.04 | 5.83 | 0.12 |
| 10W1 | 0.01 | 0.02 | 14.67 | 0.54 |
| 10AD1 | 0.76 | 0.03 | 25.11 | 0.36 |
| 10AG1 | 0.51 | 0.02 | 5.40 | 0.10 |
| 11A1 | 1.04 | 0.14 | 19.24 | 0.54 |
| 11H2 | 0.18 | 0.07 | 50.95 | 2.61 |
| 12D2 | 0.08 | 0.03 | 13.51 | 0.40 |
| 12D3 | 0.23 | 0.06 | 17.42 | 0.36 |
| 13A1 | −0.09 | 0.06 | 21.10 | 0.51 |
| 13C2 | 0.22 | 0.04 | 6.21 | 0.51 |
| 13C3 | 0.06 | 0.04 | 9.10 | 0.55 |
| 13C4 | 0.02 | 0.03 | 0.31 | 0.03 |
| 13C9 | 3.75 | 0.23 | 8.49 | 0.70 |
| 13F1 | 0.36 | 0.04 | 6.67 | 0.49 |
| 51A2 | 0.01 | 0.01 | 0.32 | 0.04 |
| 51A4 | 0.08 | 0.02 | 0.23 | 0.03 |
| 51A7 | 0.25 | 0.04 | 15.74 | 0.09 |
| 51B2 | 0.63 | 0.04 | 29.44 | 0.36 |
| 51B4 | 0.18 | 0.04 | 55.86 | 0.13 |
| 51B5 | 0.53 | 0.04 | 5.59 | 0.01 |
| 51B6 | 0.35 | 0.13 | 15.21 | 0.71 |
| 51D1 | 2.22 | 0.14 | 19.27 | 0.77 |
| 51E2 | 29.92 | 1.09 | 32.72 | 1.44 |
| 51F1 | −0.02 | 0.06 | 15.26 | 0.82 |
| 51F2 | −0.01 | 0.08 | 0.16 | 0.08 |
| 51G1 | 0.21 | 0.07 | 0.67 | 0.06 |
| 51G2 | 0.14 | 0.08 | 4.01 | 0.28 |
| 51I1 | −0.05 | 0.07 | 3.71 | 0.23 |
| 51I2 | 0.65 | 0.10 | 4.22 | 0.10 |
| 51J1 | −0.12 | 0.07 | 0.01 | 0.06 |
| 51L1 | 0.62 | 0.03 | 17.83 | 1.37 |
| 51M1 | −0.05 | 0.02 | 3.26 | 0.29 |
| 51Q1 | 0.09 | 0.04 | 7.74 | 0.53 |
| 51S1 | 4.24 | 0.37 | 67.95 | 4.75 |
| 51T1 | 0.30 | 0.01 | 29.44 | 1.41 |
| 51V1 | 0.08 | 0.00 | 14.15 | 1.28 |
| 52A1 | −0.01 | 0.02 | 8.46 | 0.67 |
| 52A5 | −0.06 | 0.02 | 2.41 | 0.22 |
| 52B2 | 0.06 | 0.01 | 15.35 | 1.15 |
| 52B4 | 0.29 | 0.02 | 24.02 | 1.75 |
| 52B6 | −0.09 | 0.01 | 0.63 | 0.04 |
| 52D1 | 0.16 | 0.01 | 0.97 | 0.03 |
| 52E5 | 0.05 | 0.01 | 16.11 | 1.37 |
| 52E6 | 0.34 | 0.04 | 1.70 | 0.14 |
| 52H1 | 0.22 | 0.01 | 1.93 | 0.16 |
| 52I1 | 0.09 | 0.02 | 15.09 | 1.35 |
| 52I2 | 0.14 | 0.01 | 26.13 | 2.28 |
| 52J3 | 0.07 | 0.01 | 6.24 | 0.54 |
| 52K1 | 0.02 | 0.01 | 0.17 | 0.01 |
| 52K2 | 0.00 | 0.02 | 0.35 | 0.02 |
| 52N1 | 0.31 | 0.07 | 3.48 | 0.17 |
| 52R1 | 0.29 | 0.06 | 5.08 | 0.20 |
| 52W1 | 0.21 | 0.06 | 2.46 | 0.15 |
| 56A5 | 0.39 | 0.05 | 1.38 | 0.08 |
| 56B4 | 0.30 | 0.07 | 1.13 | 0.04 |
| 9K2 | 0.10 | 0.06 | 0.28 | 0.05 |

TABLE 16

| | The number of reference genes |
|---|---|
| 1B1 | 144 |
| 1D2 | 219 |
| 1D4 | 49 |
| 1E2 | 48 |
| 1F1 | 180 |
| 1G1 | 87 |
| 111 | 151 |
| 1J1 | 104 |
| 1J4 | 183 |
| 1K1 | 118 |
| 1L1 | 89 |
| 1L3 | 119 |
| 1L4 | 171 |
| 1L6 | 75 |
| 1L8 | 235 |
| 1M1 | 29 |
| 1Q1 | 124 |
| 1S1 | 150 |
| 1S2 | 22 |
| 2A1 | 160 |
| 2A5 | 128 |
| 2A7 | 28 |
| 2A14 | 108 |
| 2B2 | 157 |
| 2B3 | 112 |
| 2B6 | 74 |
| 2C1 | 90 |
| 2F1 | 51 |
| 2F2 | 23 |
| 2H1 | 103 |
| 2H2 | 138 |
| 2K2 | 162 |
| 2S2 | 121 |
| 2V1 | 28 |
| 2V2 | 114 |
| 2Z1 | 220 |
| 2AE1 | 172 |
| 2AP1 | 102 |
| 2AT4 | 198 |
| 3A1 | 195 |
| 3A3 | 153 |
| 4A5 | 160 |
| 4A15 | 211 |
| 4A47 | 247 |
| 4B1 | 221 |
| 4C3 | 122 |
| 4C6 | 240 |
| 4C11 | 245 |
| 4C12 | 243 |
| 4C16 | 233 |
| 4C46 | 221 |
| 4D1 | 162 |
| 4D2 | 90 |
| 4D9 | 138 |
| 4D11 | 132 |
| 4F17 | 31 |
| 4F21 | 16 |
| 4P4 | 244 |
| 4X1 | 106 |
| 4X2 | 221 |
| 5B2 | 150 |
| 5B12 | 193 |
| 5B17 | 53 |
| 5H1 | 25 |
| 5H2 | 129 |
| 5H6 | 16 |
| 5H14 | 36 |
| 5K3 | 171 |
| 5AK2 | 91 |
| 5AR1 | 28 |
| 5AS1 | 225 |
| 6B1 | 244 |
| 6B3 | 27 |
| 6C2 | 244 |
| 6C3 | 244 |
| 6C4 | 210 |
| 6C6 | 226 |
| 6C65 | 95 |
| 6C68 | 94 |
| 6C70 | 139 |
| 6C74 | 134 |
| 6C75 | 170 |
| 6C76 | 195 |
| 6K3 | 250 |
| 6K6 | 137 |
| 6N2 | 164 |
| 8S1 | 242 |
| 9A2 | 27 |
| 9A4 | 211 |
| 10A3 | 165 |
| 10A7 | 124 |
| 10G6 | 98 |
| 10G9 | 137 |
| 10H1 | 189 |
| 10H2 | 86 |
| 10H3 | 151 |
| 10H4 | 96 |
| 10H5 | 26 |
| 10P1 | 124 |
| 10S1 | 152 |
| 10V1 | 242 |
| 10W1 | 178 |
| 10AD1 | 241 |
| 10AG1 | 241 |
| 11A1 | 227 |
| 11H2 | 98 |
| 12D2 | 232 |
| 12D3 | 136 |
| 13A1 | 233 |
| 13C2 | 108 |
| 13C3 | 140 |
| 13C4 | 105 |
| 13C9 | 114 |
| 13F1 | 205 |
| 51A2 | 138 |
| 51A4 | 137 |
| 51A7 | 223 |
| 51B2 | 145 |
| 51B4 | 75 |
| 51B5 | 83 |
| 51B6 | 164 |
| 51D1 | 152 |
| 51E2 | 222 |
| 51F1 | 215 |
| 51F2 | 233 |
| 51G1 | 143 |
| 51G2 | 244 |
| 51I1 | 158 |
| 51I2 | 169 |
| 51J1 | 107 |
| 51L1 | 149 |
| 51M1 | 132 |
| 51Q1 | 227 |
| 51S1 | 152 |
| 51T1 | 146 |
| 51V1 | 244 |
| 52A1 | 247 |
| 52A5 | 240 |
| 52B2 | 245 |
| 52B4 | 248 |
| 52B6 | 135 |
| 52D1 | 232 |
| 52E5 | 157 |
| 52E6 | 207 |
| 52H1 | 242 |
| 52I1 | 93 |
| 52I2 | 155 |
| 52J3 | 244 |
| 52K1 | 192 |
| 52K2 | 59 |
| 52N1 | 104 |
| 52R1 | 244 |
| 52W1 | 152 |
| 56A5 | 17 |
| 56B4 | 86 |
| 9K2 | 246 |

### Example 6: Applicable Range of Consensus Design Method—3

[0361] The applicability of the consensus design method was tested as to an olfactory receptor group other than the 9 types of Example 1, the 34 types of Example 2, the 58 types of Example 4, and the 156 types of Example 5 described above. Specifically, the consensus design by the method (c) Ortholog or (d) was applied to target olfactory receptors (50 types of human olfactory receptors in Table 17). The consensus design (c) was applied to the olfactory receptors other than OR8H2, and the consensus design (d) was applied to OR8H2.

[0362] As for OR5I1 among the olfactory receptors to which the consensus design (c) was applied, a consensus residue nearest to the N terminus was a consensus residue at a position corresponding to a C-terminal side of the N terminus of the original human OR5I1 serving as a reference, and was not a methionine residue. Therefore, if a consensus residue on an N-terminal side of a consensus residue consisting of a methionine residue positioned nearest to the N terminus is changed to the absence of a consensus residue, the full-length of the amino acid sequence of the resulting consensus receptor is shorter by 10% or more than the full-length of the amino acid sequence of the original human OR5I1. Hence, instead of this method, the consensus residue nearest to the N terminus was substituted by methionine.

[0363] Table 17 shows cases where the membrane expression level was increased by the method (c) or (d) (n=3). Table 18 shows the number of reference genes (the total number of the original olfactory receptor gene and the identified orthologs or orthologs and paralogs) used for preparing the consensus olfactory receptors. The results of Table 17 revealed that the consensus design method of the present invention can increase membrane expression levels of an exceedingly large number of olfactory receptors.

TABLE 17

| | Original | | Consensus | |
|---|---|---|---|---|
| | Membrane | | Membrane | |
| | expression | | expression | |
| | level (%) | SEM | level (%) | SEM |
| 2A2 | 0.35 | 0.08 | 0.76 | 0.12 |
| 2A12 | 0.79 | 0.19 | 10.47 | 2.45 |
| 4S1 | 0.23 | 0.01 | 25.74 | 4.69 |
| 5AC2 | 0.86 | 0.06 | 1.75 | 0.35 |
| 5B3 | 0.45 | 0.04 | 7.05 | 0.30 |
| 5D13 | 0.29 | 0.02 | 35.61 | 2.00 |
| 5D14 | 0.20 | 0.00 | 1.11 | 0.02 |
| 5D16 | 0.14 | 0.02 | 7.04 | 0.18 |
| 5D18 | 0.11 | 0.02 | 34.39 | 2.27 |
| 5J2 | 1.38 | 0.05 | 13.92 | 0.73 |
| 5K4 | 0.19 | 0.04 | 1.17 | 0.23 |
| 5L1 | 0.22 | 0.03 | 7.42 | 0.29 |
| 5L2 | 0.23 | 0.03 | 9.99 | 0.36 |
| 5M1 | 0.33 | 0.03 | 0.99 | 0.05 |
| 5M3 | 0.18 | 0.01 | 2.95 | 0.14 |
| 5M8 | 0.13 | 0.01 | 1.31 | 0.07 |
| 5M9 | 0.25 | 0.02 | 9.91 | 0.44 |
| 5M10 | 0.90 | 0.03 | 1.21 | 0.04 |
| 5M11 | 0.06 | 0.02 | 4.54 | 0.44 |
| 5P2 | 0.09 | 0.01 | 17.01 | 0.61 |
| 5T1 | 1.19 | 0.03 | 0.71 | 0.03 |
| 5T2 | 0.08 | 0.01 | 0.52 | 0.03 |
| 5T3 | 0.10 | 0.05 | 6.56 | 0.09 |
| 6M1 | 0.02 | 0.02 | 3.06 | 0.03 |
| 6N1 | 0.41 | 0.01 | 14.69 | 0.97 |
| 6P1 | 1.26 | 0.07 | 9.83 | 0.69 |
| 6Q1 | 0.16 | 0.08 | 15.54 | 0.23 |
| 6T1 | −0.05 | 0.03 | 1.73 | 0.07 |
| 6X1 | 0.30 | 0.17 | 4.58 | 0.17 |
| 8B4 | 0.15 | 0.05 | 2.29 | 0.08 |
| 8B8 | −0.08 | 0.03 | 0.26 | 0.05 |
| 8B12 | 0.22 | 0.11 | 15.66 | 0.27 |
| 8D1 | 8.41 | 0.24 | 24.38 | 0.33 |
| 8G1 | 0.85 | 0.05 | 3.44 | 0.07 |
| 8G5 | −0.02 | 0.03 | 0.40 | 0.03 |
| 8H2 | 0.05 | 0.04 | 4.86 | 0.14 |
| 8I2 | 1.57 | 0.04 | 25.51 | 0.30 |
| 8J1 | 2.63 | 0.09 | 8.18 | 0.13 |
| 8K1 | 1.84 | 0.08 | 2.24 | 0.10 |
| 8K3 | 0.61 | 0.05 | 9.84 | 0.74 |
| 8K5 | 0.19 | 0.02 | 7.08 | 0.54 |
| 8U1 | 0.50 | 0.05 | 0.72 | 0.02 |
| 9G1 | 0.16 | 0.01 | 10.71 | 0.80 |
| 9G4 | 0.15 | 0.02 | 3.59 | 0.27 |
| 9I1 | 0.26 | 0.01 | 9.37 | 0.67 |
| 11H12 | 0.10 | 0.03 | 34.26 | 2.14 |
| 52M1 | 0.17 | 0.08 | 0.39 | 0.11 |
| 52N5 | 0.14 | 0.01 | 0.50 | 0.07 |
| 56A3 | 0.50 | 0.08 | 0.78 | 0.13 |
| 5I1 | 0.04 | 0.02 | 3.54 | 0.11 |

TABLE 18

| | The number of |
|---|---|
| | reference |
| | genes |
| 2A2 | 137 |
| 2A12 | 98 |
| 4S1 | 89 |
| 5AC2 | 48 |
| 5B3 | 176 |
| 5D13 | 239 |
| 5D14 | 133 |
| 5D16 | 45 |
| 5D18 | 210 |
| 5J2 | 47 |
| 5K4 | 72 |
| 5L1 | 215 |
| 5L2 | 40 |
| 5M1 | 39 |
| 5M3 | 180 |
| 5M8 | 141 |
| 5M9 | 147 |
| 5M10 | 200 |
| 5M11 | 155 |
| 5P2 | 23 |
| 5T1 | 119 |
| 5T2 | 125 |
| 5T3 | 49 |
| 6M1 | 242 |
| 6N1 | 83 |
| 6P1 | 137 |
| 6Q1 | 160 |
| 6T1 | 106 |
| 6X1 | 216 |
| 8B4 | 146 |
| 8B8 | 28 |
| 8B12 | 145 |
| 8D1 | 122 |
| 8G1 | 119 |
| 8G5 | 46 |
| 8H2 | 233 |
| 8I2 | 119 |
| 8J1 | 55 |
| 8K1 | 146 |
| 8K3 | 246 |
| 8K5 | 232 |
| 8U1 | 22 |
| 9G1 | 88 |
| 9G4 | 231 |
| 9I1 | 242 |
| 11H12 | 97 |
| 52M1 | 243 |
| 52N5 | 104 |
| 56A3 | 244 |
| 5I1 | 109 |

### Example 7: Applicable Range of Consensus Design Method—4

[0364] The consensus design by the method (c) Ortholog was applied to OR5AN1 analyzed in detail as a musk receptor. However, the consensus design was not found to increase its membrane expression level (FIGS. 9A and 9B). On the other hand, when responsiveness to a known agonist was compared between the original OR5AN1 and consensus OR5AN1, the consensus design was found to elevate the responsiveness (odorant #1 to #8 in FIGS. 9C and 9D). The odorants used are shown in Table 19. Odorant #7 and #8 caused no response of the original OR5AN1 but caused a response of consensus OR5AN1. Although this result seems to suggest the possibility that the consensus design changed ligand selectivity from the original one, the possibility is presumably low. This is because odorant #7 and #8 have been shown to cause a response, albeit weak, of the original OR5AN1 according to the report of Sato-Akuhara et al. (J Neurosci. 36 (16): 4482-4491 (2016)). Thus, the original OR5AN1 exhibited no response to odorant #7 and #8 presumably because the present evaluation system had lower sensitivity than that in preceding studies. By contrast, the results showing a response by the consensus design is considered not to indicate abnormality in ligand selectivity, and probably indicate elevation in response sensitivity to an inherent agonist. Odorants #9 to #21 include a substance similar in chemical structure or odor quality to an OR5AN1 agonist, and further include a substance which does not activate OR5AN1 in the report of Sato-Akuhara et al. As a result of performing response measurement therefor, consensus OR5AN1 was shown to not respond to a substance which was not recognized by the original OR5AN1, and further supported no large change in ligand selectivity by the consensus design. The consensus design which elevates responsiveness, despite no increase in membrane expression level, is not limited by OR5AN1, and is also found in OR4S2 (Primate ortholog/paralog) and OR7A17 (Primate ortholog) in FIG. 1. The possibility is suggested that such consensus design enhances the efficiency of shift of the receptor protein to an active structure, the efficiency of coupling to G protein, or the like. These results showed that the consensus design technique of the present invention may be effective for analyzing functions of olfactory receptors with high sensitivity, even if not increasing their membrane expression levels.

TABLE 19

| No. | Odorant |
|---|---|
| 1 | musk ketone |
| 2 | civettone |
| 3 | globanone ™ |
| 4 | cyclopentadecanone/exaltone |
| 5 | muscenone ™ delta |
| 6 | muscone |
| 7 | cyclopentadecanol |
| 8 | ethylene brassylate |
| 9 | ambrettolide |
| 10 | cyclododecanone |
| 11 | habanolide ™ |
| 12 | pentalide |
| 13 | galaxolide |
| 14 | tentarome/tonalid ™ |
| 15 | celestolide |
| 16 | helvetolide |
| 17 | romandolide ™ |
| 18 | ω-dodecanolactam |
| 19 | amber xtreme ™ |
| 20 | beta-ionone |
| 21 | ambrinol |

### Example 8: Applicable Range of Consensus Design Method—5

[0365] The consensus design was confirmed to be also effective for the analysis of mouse olfactory receptors. M71 (Olfr-151, MOR171-2) was focused on as a typical mouse olfactory receptor analyzed from long ago, and the consensus design by the method (c) Ortholog was applied thereto. Specifically, 249 genes having high homology to the amino acid sequence of M71 were selected, and consensus amino acid sequences were determined. M71 obtained by the consensus design was inserted downstream of a FLAG tag and a Rho tag in a pME18S vector, as in the human olfactory receptors, and HEK293 cells were transfected with the resulting vector. Then, expression levels of proteins on cell membranes were measured 24 hours later (n=3). As a result, the membrane expression level (Cell surface expression (%)) of the original M71 was 0.78±0.07 (mean±SEM), whereas the membrane expression level was increased to 3.20±0.19 for M71 obtained by the consensus design. Thus, the consensus design was shown to be also effective for olfactory receptors of non-human organism species.

### Example 9: Identification of Olfactory Receptor which Responds to Sulfur Compound

### 1) Preparation of Olfactory Receptor-Expressing Cell

[0366] A reaction solution as to each consensus olfactory receptor prepared in Examples described above was prepared according to the composition shown in Table 4, left standing for 20 minutes in a clean bench, and then added to each well of a 96-well plate (Becton, Dickinson and Company). The original olfactory receptor was used as to OR4S2. Composition shown in Table 20 was used as to OR11H2 and OR4E2. Subsequently, 100 μL of HEK293 cells suspended in DMEM (Nacalai Tesque, Inc.) was inoculated at 2×10⁵ cells/cm² to each well, and cultured for 24 hours in an incubator kept at 37° C. and 5% CO₂. Cells expressing no olfactory receptor (Mock) were provided as a control.

TABLE 20
Reaction solution composition: per well of 96-well plate

| | |
|---|---|
| DMEM (Nacalai) | 10 μL |
| Olfactory receptor gene | 0.0075 μg |
| (incorporated in pME18S vector) | |
| pGL4.29 (fluc2P-CRE-hygro, Promega) | 0.03 μg |
| pGL4.75 (hRluc2P-CMV-hygro, Promega) | 0.003 μg |
| pME18S-RTP1S | 0.03 μg |
| POLYETHYLENIMINE-MAX | 0.18 μL |
| (0.1% Aqueous solution, pH7.4, COSMO BIO) | |

### 2) Luciferase Assay

[0367] The medium was removed from the cultures prepared in 1), and 75 μL of a test substance solution (methyl mercaptan (MeSH) (CAS: 74-93-1, Tokyo Chemical Industry Co., Ltd.), dimethyl sulfide (DMS) (CAS: 75-18-3, FUJIFILM Wako Pure Chemical Corp.), dimethyl disulfide (DMDS) (CAS: 624-92-0, Tokyo Chemical Industry Co., Ltd.), concentration range: 0 μM, 1 μM, 3 μM, 10 μM, 30 μM, 100 μM, and 300 μM, or dimethyl trisulfide (DMTS) (CAS: 3658-80-8, Tokyo Chemical Industry Co., Ltd.), concentration range: 0 μM, 0.1 μM, 0.3 μM, 1 μM, 3 μM, 10 μM, and 30 μM) prepared with a fresh medium was added thereto. Under a copper ion addition condition, the test substance solution was adjusted to contain 30 μM copper(II) chloride (FUJIFILM Wako Pure Chemical Corp.) in addition to the odorant. The cells were cultured for 4 hours in a CO₂ incubator and the luciferase gene was expressed sufficiently in the cells. Luciferase activity was measured using Dual-Glo™ luciferase assay system (Promega Corp.) in accordance with the operation manual of the product. A luminescence value derived from firefly luciferase induced by test substance stimulation in each well of the 96-well plate was divided by a luminescence value derived from Renilla luciferase to calculate a value (fluc/hRluc) as a signal, which was then used in analysis. The signal under each transfection condition was normalized with the signal value (fluc/hRluc) under an odorant stimulation-free condition defined as 0% and the signal value (fluc/hRluc) by stimulation with 10 μM forskolin defined as 100%, and used as a response (%) in analysis.

### 3) Results

[0368] FIG. 10 shows olfactory receptors which responded to methyl mercaptan, dimethyl sulfide, dimethyl disulfide, or dimethyl trisulfide in the presence of a copper ion among the tested olfactory receptors. In FIG. 10, response values to each concentration of methyl mercaptan, dimethyl sulfide, dimethyl disulfide, or dimethyl trisulfide are shown as to the individual olfactory receptors. Each olfactory receptor is a consensus olfactory receptor except for OR4S2. Statistically significant difference was found between the response value (Response (%)) of each olfactory receptor to the highest concentration of 300 μM (30 μM for DMTS) tested and the response value (Response (%)) in cells expressing no receptor under a Mock condition (Student's t-test, P<0.05). For each olfactory receptor, significant difference was also found in the same statistical approach as above when the signal value (fluc/hRluc) under an odorant stimulation-free condition was compared with the signal value (fluc/hRluc) under a condition of stimulation at the highest concentration of 300 μM (30 μM for DMTS). The numeric values in Tables 21 to 24 are EC50 (μM) calculated by the regression of the value of Response (%) to a sigmoid curve. As listed in FIG. 10, the olfactory receptors without the description of EC50 (μM) in Tables 21 to 24 mean that although the receptors can respond to methyl mercaptan, dimethyl sulfide, dimethyl disulfide, or dimethyl trisulfide, data sufficient for regression to a sigmoid curve was not obtained in the concentration range tested this time and no EC50 was calculated. Thus, consensus OR2T29, consensus OR4K17, consensus OR2T27, consensus OR2T5, consensus OR2T4, consensus OR11H2, consensus OR6B3, consensus OR12D3, consensus OR2T11, OR4S2, consensus OR2T1, consensus OR4C15, consensus OR4E2, and consensus OR2L13 responded to methyl mercaptan. Among them, consensus OR2T29, consensus OR2T5, consensus OR2T4, consensus OR2T11, consensus OR2T1, and consensus OR4E2 were also confirmed to have a dose-dependent response to methyl mercaptan. Consensus OR4K17, consensus OR11H2, OR4S2, consensus OR4C15, and consensus OR4E2 responded to dimethyl sulfide in a dose-dependent manner. Consensus OR2T29, consensus OR4K17, consensus OR2T27, consensus OR2T5, consensus OR2T4, consensus OR11H2, consensus OR6B3, consensus OR12D3, consensus OR2T11, OR4S2, consensus OR2T1, consensus OR4C15, consensus OR4E2, and consensus OR2L13 responded to dimethyl disulfide. Among them, consensus OR4K17, consensus OR6B3, consensus OR2T11, OR4S2, consensus OR4C15, and consensus OR4E2 were also confirmed to have a dose-dependent response to dimethyl disulfide. Consensus OR2T29, consensus OR2T4, consensus OR11H2, consensus OR6B3, consensus OR12D3, consensus OR6B1, consensus OR2T11, OR4S2, consensus OR2T1, consensus OR4C15, consensus OR4E2, and consensus OR2L13 responded to dimethyl trisulfide. Among them, consensus OR2T11, OR4S2, and consensus OR4E2 were also confirmed to have a dose-dependent response to dimethyl trisulfide. For example, OR2T11 and OR2T1 are known to respond to methyl mercaptan in the presence of a metal ion (JP-B-6122181). The results about consensus OR2T11 and consensus OR2T1 which responded to methyl mercaptan are consistent with the finding. Accordingly, consensus OR2T29, consensus OR4K17, consensus OR2T27, consensus OR2T5, consensus OR2T4, consensus OR11H2, consensus OR6B3, consensus OR12D3, consensus OR6B1, consensus OR2T11, OR4S2, consensus OR2T1, consensus OR4C15, consensus OR4E2, and consensus OR2L13 were found to respond to at least one sulfur compound selected from the group consisting of methyl mercaptan, dimethyl sulfide, dimethyl disulfide, and dimethyl trisulfide.

TABLE 21

| Consensus | EC₅₀(μM) with 30 μM CuCl₂ |
|---|---|
| receptor | MeSH |
| OR2T29 | 85 |
| OR2T5 | 217 |
| OR2T4 | 340 |
| OR2T11 | 5 |
| OR2T1 | 33 |
| OR4E2 | 250 |

TABLE 22

| Consensus | EC₅₀(μM) with 30 μM CuCl₂ |
|---|---|
| receptor | DMS |
| OR4K17 | 188 |
| OR11H2 | 22 |
| OR4S2 (original) | 22 |
| OR4C15 | 414 |
| OR4E2 | 22 |

TABLE 23

| Consensus | EC₅₀ (μM) with 30 μM CuCl₂ |
|---|---|
| receptor | DMDS |
| OR4K17 | 568 |
| OR6B3 | 1597 |
| OR2T11 | 246 |
| OR4S2 (original) | 530 |
| OR4C15 | 615 |
| OR4E2 | 397 |

TABLE 24

| Consensus | EC₅₀ (μM) with 30 μM CuCl₂ |
|---|---|
| receptor | DMTS |
| OR2T11 | 26 |
| OR4S2 (original) | 28 |
| OR4E2 | 33 |

[0369] FIG. 11 shows olfactory receptors improved in responsiveness to methyl mercaptan, dimethyl sulfide, dimethyl disulfide, or dimethyl trisulfide in the presence of a copper ion in comparison with that in the absence of the copper ion among the tested olfactory receptors. In FIG. 11, signal values to 100 μM methyl mercaptan, dimethyl sulfide, dimethyl disulfide, or dimethyl trisulfide are shown as to the individual olfactory receptors. Each olfactory receptor is a consensus olfactory receptor except for OR4S2. Consensus OR2T29, consensus OR4K17, consensus OR2T27, consensus OR2T5, consensus OR2T4, consensus OR2T11, OR4S2, consensus OR2T1, consensus OR4C15, and consensus OR4E2 were improved in responsiveness to methyl mercaptan, dimethyl sulfide, dimethyl disulfide, or dimethyl trisulfide in the presence of a copper ion in comparison with that in the absence of the copper ion.

[0370] The response of a consensus olfactory receptor to an odorant reflects a response of the original olfactory receptor to olfactory cells. Accordingly, from the results described above, the original OR2T29, OR4K17, OR2T27, OR2T5, OR2T4, OR11H2, OR6B3, OR12D3, OR6B1, OR2T11, OR4S2, OR2T1, OR4C15, OR4E2, and OR2L13 were identified as receptors for a sulfur compound.

[0371] Tables 25-1 to 25-5 below show the amino acid sequences of the original olfactory receptors, the amino acid sequences of the consensus olfactory receptors, and the consensus design method used in Examples 1 to 9 described above.

TABLE 25-1

| | | | SEQ ID | SEQ ID | |
|---|---|---|---|---|---|
| | | | NO of | NO of | |
| | | | original | consensus | |
| | | | amino | amino | Consensus |
| | Olfactory | | acid | acid | design |
| No. | receptor | Accession No. | sequence | sequence | method |
| 1 | OR2A25 | NP_001004488.1 | 1 | 97 | a |
| 2 | OR2A25 | NP_001004488.1 | 1 | 98 | b |
| 3 | OR2A25 | NP_001004488.1 | 1 | 99 | c |
| 4 | OR2AG1 | NP_001004489.1 | 2 | 100 | c |
| 5 | OR2AG2 | NP_001004490.1 | 3 | 101 | c |
| 6 | OR2D2 | ALI87480.1 | 4 | 102 | c |
| 7 | OR2D3 | NP_001004684.1 | 5 | 103 | c |
| 8 | OR2T11 | NP_001001964.1 | 6 | 104 | a |
| 9 | OR2T11 | NP_001001964.1 | 6 | 105 | b |
| 10 | OR2T11 | NP_001001964.1 | 6 | 106 | c |
| 11 | OR2W1 | NP_112165.1 | 7 | 107 | a |
| 12 | OR2W1 | NP_112165.1 | 7 | 108 | b |
| 13 | OR2W1 | NP_112165.1 | 7 | 109 | c |
| 14 | OR2W3 | NP_001001957.2 | 8 | 110 | c |
| 15 | OR2Y1 | NP_001001657.1 | 9 | 111 | c |
| 16 | OR3A2 | NP_002542.3 | 10 | 112 | c |
| 17 | OR4A16 | NP_001005274.1 | 11 | 113 | c |
| 18 | OR4C15 | NP_001001920.2 | 12 | 114 | c |
| 19 | OR4D5 | NP_001001965.1 | 13 | 115 | c |
| 20 | OR4D6 | NP_001004708.1 | 14 | 116 | c |
| 21 | OR4F15 | NP_001001674.1 | 15 | 117 | c |
| 22 | OR4K15 | NP_001005486.1 | 16 | 118 | c |
| 23 | OR4Q3 | NP_751944.1 | 17 | 119 | a |
| 24 | OR4Q3 | NP_751944.1 | 17 | 120 | b |
| 25 | OR4Q3 | NP_751944.1 | 17 | 121 | c |
| 26 | OR4S2 | NP_001004059.2 | 18 | 122 | a |
| 27 | OR4S2 | NP_001004059.2 | 18 | 123 | b |
| 28 | OR4S2 | NP_001004059.2 | 18 | 124 | c |
| 29 | OR5A2 | NP_001001954.1 | 19 | 125 | c |
| 30 | OR5C1 | NP_001001923.1 | 20 | 126 | c |
| 31 | OR5W2 | NP_001001960.1 | 21 | 127 | c |
| 32 | OR6A2 | NP_003687.2 | 22 | 128 | c |
| 33 | OR6B2 | NP_001005853.1 | 23 | 129 | c |
| 34 | OR6C1 | NP_001005182.1 | 24 | 130 | c |
| 35 | OR6Y1 | NP_001005189.1 | 25 | 131 | a |
| 36 | OR6Y1 | NP_001005189.1 | 25 | 132 | b |
| 37 | OR6Y1 | NP_001005189.1 | 25 | 133 | c |
| 38 | OR7A17 | NP_112163.1 | 26 | 134 | a |
| 39 | OR7A17 | NP_112163.1 | 26 | 135 | b |
| 40 | OR7A17 | NP_112163.1 | 26 | 136 | c |
| 41 | OR7D4 | NP_001005191.1 | 27 | 137 | a |
| 42 | OR7D4 | NP_001005191.1 | 27 | 138 | b |
| 43 | OR7D4 | NP_001005191.1 | 27 | 139 | c |
| 44 | OR10A2 | NP_001004460.1 | 28 | 140 | c |
| 45 | OR10A4 | ALI87721.1 | 29 | 141 | c |
| 46 | OR10D3 | NP_001342142.1 | 30 | 142 | c |
| 47 | OR10Q1 | NP_001004471.1 | 31 | 143 | c |
| 48 | OR10Z1 | NP_001004478.1 | 32 | 144 | c |
| 49 | OR11H1 | NP_001005239 | 33 | 145 | d |
| 50 | OR11H4 | NP_001004479.1 | 34 | 146 | a |
| 51 | OR11H4 | NP_001004479.1 | 34 | 147 | b |
| 52 | OR11H4 | NP_001004479.1 | 34 | 148 | c |
| 53 | OR13C8 | NP_001004483.1 | 35 | 148 | c |
| 54 | OR13G1 | NP_001005487.1 | 36 | 150 | c |
| 55 | OR52A4 | AA140753.1 | 37 | 151 | c |
| 56 | OR56A4 | NP_001005179.3 | 38 | 152 | c |

TABLE 25-2

| | | | SEQ ID | SEQ ID | |
|---|---|---|---|---|---|
| | | | NO of | NO of | |
| | | | original | consensus | |
| | | | amino | amino | Consensus |
| | Olfactory | | acid | acid | design |
| No. | receptor | Accession No. | sequence | sequence | method |
| 57 | OR2B11 | NP_001004492.1 | 39 | 153 | c |
| 58 | OR2C3 | NP_932340.4 | 40 | 154 | c |
| 59 | OR2G2 | NP_001001915.1 | 41 | 155 | c |
| 60 | OR2G3 | NP_001001914.1 | 42 | 156 | c |
| 61 | OR2L2 | NP_001004686.1 | 43 | 157 | c |
| 62 | OR2L3 | NP_001004687.1 | 44 | 158 | c |
| 63 | OR2L5 | NP_001245213.1 | 45 | 159 | c |
| 64 | OR2L8 | NP_001001963.1 | 46 | 160 | c |
| 65 | OR2L13 | NP_001291464.1 | 47 | 161 | c |
| 66 | OR2M2 | NP_001004688.1 | 48 | 162 | c |
| 67 | OR2M4 | NP_059974.1 | 49 | 163 | c |
| 68 | OR2T1 | NP_112166.2 | 50 | 164 | c |
| 69 | OR2T4 | NP_001004696.2 | 51 | 165 | c |
| 70 | OR2T5 | NP_001004697.1 | 52 | 166 | c |
| 71 | OR2T6 | NP_001005471.1 | 53 | 167 | c |
| 72 | OR2T7 | NP_001372981.1 | 54 | 168 | d |
| 73 | OR2T8 | NP_001005522.1 | 55 | 169 | c |
| 74 | OR2T12 | NP_001004692.1 | 56 | 170 | c |
| 75 | OR2T27 | NP_001001824.1 | 57 | 171 | c |
| 76 | OR2T29 | NP_001004694.2 | 58 | 172 | c |
| 77 | OR2T33 | NP_001004695.1 | 59 | 173 | c |
| 78 | OR2T34 | NP_001001821.1 | 60 | 174 | c |
| 79 | OR2T35 | NP_001001827.1 | 61 | 175 | c |
| 80 | OR2AK2 | NP_001004491.1 | 62 | 176 | c |
| 81 | OR4D10 | NP_001004705.1 | 63 | 177 | c |
| 82 | OR4E2 | NP_001001912.2 | 64 | 178 | c |
| 83 | OR4F5 | NP_001005484.2 | 65 | 179 | d |
| 84 | OR4K1 | XP_011535455.1 | 66 | 180 | c |
| 85 | OR4K2 | NP_001005501.1 | 67 | 181 | c |
| 86 | OR4K5 | NP_001005483.1 | 68 | 182 | c |
| 87 | OR4K17 | NP_001004715.3 | 69 | 183 | c |
| 88 | OR4L1 | NP_001004717.1 | 70 | 184 | c |
| 89 | OR4M1 | NP_001005500.1 | 71 | 185 | c |
| 90 | OR4N2 | NP_001004723.1 | 72 | 186 | c |
| 91 | OR4N5 | NP_01004724.1 | 73 | 187 | c |
| 92 | OR5A1 | NP_001004728 | 74 | 188 | c |
| 93 | OR6F1 | NP_001005286.1 | 75 | 189 | c |
| 94 | OR6J1 | NP_001335162.1 | 76 | 190 | c |
| 95 | OR7A10 | NP_001005190.1 | 77 | 191 | c |
| 96 | OR7C2 | NP_036509.1 | 78 | 192 | c |
| 97 | OR7G2 | NP_001005193.2 | 79 | 193 | c |
| 98 | OR7G3 | NP_001001958.1 | 80 | 194 | c |
| 99 | OR10G2 | NP_001005466.2 | 81 | 195 | c |
| 100 | OR10J1 | NP_036483.3 | 82 | 196 | c |
| 101 | OR10J3 | NP_01004467.1 | 83 | 197 | c |
| 102 | OR10K1 | NP_001004473.1 | 84 | 198 | c |
| 103 | OR10K2 | NP_001004476.1 | 85 | 199 | c |
| 104 | OR10T2 | NP_001004475.1 | 86 | 200 | c |
| 105 | OR10X1 | NP_001004477.1 | 87 | 201 | c |
| 106 | OR11G2 | NP_001372962.1 | 88 | 202 | c |
| 107 | OR11H6 | NP_001004480.1 | 89 | 203 | c |
| 108 | OR11H7 | NP_001335202.1 | 90 | 204 | c |
| 109 | OR11L1 | NP_001001959.1 | 91 | 205 | c |
| 110 | OR14A2 | NP_001342221.1 | 92 | 206 | c |
| 111 | OR14A16 | NP_001001966.1 | 93 | 207 | c |
| 112 | OR14C36 | NP_001001918.1 | 94 | 208 | c |
| 113 | OR14K1 | NP_001004732.2 | 95 | 209 | c |
| 114 | OR7E24 | NP_001373037.1 | 96 | 210 | c |

TABLE 25-3

| | | | SEQ ID | SEQ ID | |
|---|---|---|---|---|---|
| | | | NO of | NO of | |
| | | | original | consensus | |
| | | | amino | amino | Consensus |
| | Olfactory | | acid | acid | design |
| No. | receptor | Accession No. | sequence | sequence | method |
| 115 | OR1B1 | NP_001004450.2 | 327 | 485 | c |
| 116 | OR1D2 | NP_002539.2 | 328 | 486 | c |
| 117 | OR1D4 | NP_003543.3 | 329 | 487 | d |
| 118 | OR1E2 | NP_003545.1 | 330 | 488 | c |
| 119 | OR1F1 | NP_036492.1 | 331 | 489 | c |
| 120 | OR1G1 | NP_003546.1 | 332 | 490 | c |
| 121 | OR1I1 | NP_001004713.1 | 333 | 491 | c |
| 122 | OR1J1 | NP_001004451.1 | 334 | 492 | c |
| 123 | OR1J4 | NP_001004452.1 | 335 | 493 | c |
| 124 | OR1K1 | NP_543135.1 | 336 | 494 | c |
| 125 | OR1L1 | NP_001005236.3 | 337 | 495 | c |
| 126 | OR1L3 | NP_001005234.1 | 338 | 496 | c |
| 127 | OR1L4 | NP_001005235.1 | 339 | 497 | c |
| 128 | OR1L6 | NP_001004453.2 | 340 | 498 | c |
| 129 | OR1L8 | NP_001004454.1 | 341 | 499 | c |
| 130 | OR1M1 | NP_001004456.1 | 342 | 500 | c |
| 131 | OR1Q1 | NP_036496.1 | 343 | 501 | c |
| 132 | OR1S1 | NP_001004458.1 | 344 | 502 | c |
| 133 | OR1S2 | NP_001004459.1 | 345 | 503 | c |
| 134 | OR2A1 | NP_001005287.1 | 346 | 504 | c |
| 135 | OR2A5 | NP_036497.1 | 347 | 505 | c |
| 136 | OR2A7 | NP_001005328.1 | 348 | 506 | c |
| 137 | OR2A14 | NP_001001659.1 | 349 | 507 | c |
| 138 | OR2B2 | NP_149046.2 | 350 | 508 | c |
| 139 | OR2B3 | NP_001005226.1 | 351 | 509 | c |
| 140 | OR2B6 | NP_036499.1 | 352 | 510 | c |
| 141 | OR2C1 | NP_036500.2 | 353 | 511 | c |
| 142 | OR2F1 | NP_036501.2 | 354 | 512 | c |
| 143 | OR2F2 | NP_001004685.1 | 355 | 513 | c |
| 144 | OR2H1 | NP_001304943.1 | 356 | 514 | c |
| 145 | OR2H2 | NP_009091.3 | 357 | 515 | c |
| 146 | OR2K2 | NP_995581.1 | 358 | 516 | c |
| 147 | OR2S2 | NP_063950.2 | 359 | 517 | c |
| 148 | OR2V1 | NP_001245212.1 | 360 | 518 | c |
| 149 | OR2V2 | NP_996763.1 | 361 | 519 | c |
| 150 | OR2Z1 | NP_001004699.1 | 362 | 520 | c |
| 151 | OR2AE1 | NP_001005276.1 | 363 | 521 | c |
| 152 | OR2AP1 | NP_001245214.1 | 364 | 522 | c |
| 153 | OR2AT4 | NP_001005285.1 | 365 | 523 | c |
| 154 | OR3A1 | NP_002541.2 | 366 | 524 | c |
| 155 | OR3A3 | NP_036505.3 | 367 | 525 | d |
| 156 | OR4A5 | NP_001005272.3 | 368 | 526 | c |
| 157 | OR4A15 | NP_001005275.1 | 369 | 527 | c |
| 158 | OR4A47 | NP_001005512.2 | 370 | 528 | c |
| 159 | OR4B1 | NP_001005470.1 | 371 | 529 | c |
| 160 | OR4C3 | NP_001004702.2 | 372 | 530 | c |
| 161 | OR4C6 | NP_001004704.1 | 373 | 531 | c |
| 162 | OR4C11 | NP_001004700.2 | 374 | 532 | c |
| 163 | OR4C12 | NP_001005270.3 | 375 | 533 | c |
| 164 | OR4C16 | NP_001004701.2 | 376 | 534 | c |
| 165 | OR4C46 | NP_001004703.1 | 377 | 535 | c |
| 166 | OR4D1 | NP_036506.1 | 378 | 536 | c |
| 167 | OR4D2 | NP_001004707.1 | 379 | 537 | c |
| 168 | OR4D9 | NP_001004711.1 | 380 | 538 | c |
| 169 | OR4D11 | NP_001004706.1 | 381 | 539 | c |
| 170 | OR4F17 | NP_001005240.1 | 382 | 540 | c |
| 171 | OR4F21 | NP_001005504.1 | 383 | 541 | c |
| 172 | OR4P4 | NP_001004124.1 | 384 | 542 | c |
| 173 | OR4X1 | NP_001004726.1 | 385 | 543 | c |
| 174 | OR4X2 | NP_001004727.1 | 386 | 544 | c |
| 175 | OR5B2 | NP_001005566.1 | 387 | 545 | c |
| 176 | OR5B12 | NP_001004733.1 | 388 | 546 | c |
| 177 | OR5B17 | NP_001005489.1 | 389 | 547 | c |
| 178 | OR5H1 | NP_001005338.1 | 390 | 548 | c |
| 179 | OR5H2 | NP_001005482.2 | 391 | 549 | c |
| 180 | OR5H6 | NP_001005479.2 | 392 | 550 | c |
| 181 | OR5H14 | NP_001005514.1 | 393 | 551 | c |
| 182 | OR5K3 | NP_001005516.1 | 394 | 552 | c |
| 183 | OR5AK2 | NP_001005323.1 | 395 | 553 | c |
| 184 | OR5AR1 | NP_001004730.1 | 396 | 554 | c |
| 185 | OR5AS1 | NP_001001921.1 | 397 | 555 | c |
| 186 | OR6B1 | NP_001005281.1 | 398 | 556 | c |
| 187 | OR6B3 | NP_775486.1 | 399 | 557 | c |
| 188 | OR6C2 | NP_473446.1 | 400 | 558 | c |
| 189 | OR6C3 | NP_473445.1 | 401 | 559 | c |
| 190 | OR6C4 | NP_001372904.1 | 402 | 560 | c |
| 191 | OR6C6 | NP_001005493.1 | 403 | 561 | c |
| 192 | OR6C65 | NP_001005518.1 | 404 | 562 | c |
| 193 | OR6C68 | NP_001005519.2 | 405 | 563 | c |
| 194 | OR6C70 | NP_001005499.1 | 406 | 564 | c |

TABLE 25-4

| | | | SEQ ID | SEQ ID | |
|---|---|---|---|---|---|
| | | | NO of | NO of | |
| | | | original | consensus | |
| | | | amino | amino | Consensus |
| | Olfactory | | acid | acid | design |
| No. | receptor | Accession No. | sequence | sequence | method |
| 195 | OR6C74 | NP_001005490.1 | 407 | 565 | c |
| 196 | OR6C75 | NP_001005497.1 | 408 | 566 | c |
| 197 | OR6C76 | NP_001005183.1 | 409 | 567 | c |
| 198 | OR6K3 | NP_001005327.2 | 410 | 568 | c |
| 199 | OR6K6 | NP_001005184.1 | 411 | 569 | c |
| 200 | OR6N2 | NP_001005278.1 | 412 | 570 | c |
| 201 | OR8S1 | NP_001377778.1 | 413 | 571 | c |
| 202 | OR9A2 | NP_001001658.1 | 414 | 572 | c |
| 203 | OR9A4 | NP_001001656.1 | 415 | 573 | c |
| 204 | OR10A3 | NP_001003745.1 | 416 | 574 | c |
| 205 | OR10A7 | NP_001005280.1 | 417 | 575 | c |
| 206 | OR10G6 | NP_001342148.1 | 418 | 576 | c |
| 207 | OR10G9 | NP_001001953.1 | 419 | 577 | c |
| 208 | OR10H1 | NP_039228.1 | 420 | 578 | c |
| 209 | OR10H2 | NP_039227.1 | 421 | 579 | c |
| 210 | OR10H3 | NP_039226.1 | 422 | 580 | c |
| 211 | OR10H4 | NP_001004465.1 | 423 | 581 | c |
| 212 | OR10H5 | NP_001004466.1 | 424 | 582 | c |
| 213 | OR10P1 | NP_996782.1 | 425 | 583 | c |
| 214 | OR10S1 | NP_001004474.1 | 426 | 584 | c |
| 215 | OR10V1 | NP_001005324.1 | 427 | 585 | c |
| 216 | OR10W1 | NP_997257.2 | 428 | 586 | c |
| 217 | OR10AD1 | NP_001004134.1 | 429 | 587 | c |
| 218 | OR10AG1 | NP_001005491.2 | 430 | 588 | c |
| 219 | OR11A1 | NP_039225.1 | 431 | 589 | c |
| 220 | OR11H2 | NP_001184216.2 | 432 | 590 | d |
| 221 | OR12D2 | NP_039224.2 | 433 | 591 | c |
| 222 | OR12D3 | NP_112221.1 | 434 | 592 | c |
| 223 | OR13A1 | NP_001004297.2 | 435 | 593 | c |
| 224 | OR13C2 | NP_001004481.1 | 436 | 594 | c |
| 225 | OR13C3 | NP_001001961.2 | 437 | 595 | c |
| 226 | OR13C4 | NP_001001919.1 | 438 | 596 | c |
| 227 | OR13C9 | NP_001001956.1 | 439 | 597 | c |
| 228 | OR13F1 | NP_001004485.1 | 440 | 598 | c |
| 229 | OR51A2 | NP_001004748.1 | 441 | 599 | d |
| 230 | OR51A4 | NP_001005329.1 | 442 | 600 | c |
| 231 | OR51A7 | NP_001004749.1 | 443 | 601 | c |
| 232 | OR51B2 | NP_1494204 | 444 | 602 | c |
| 233 | OR51B4 | NP_149419.2 | 445 | 603 | c |
| 234 | OR51B5 | NP_001005567.2 | 446 | 604 | c |
| 235 | OR51B6 | NP_001004750.1 | 447 | 605 | c |
| 236 | OR51D1 | NP_001004751.1 | 448 | 606 | c |
| 237 | OR51E2 | NP_110401.1 | 449 | 607 | c |
| 238 | OR51F1 | NP_001004752.2 | 450 | 608 | c |
| 239 | OR51F2 | NP_001004753.2 | 451 | 609 | c |
| 240 | OR51G1 | NP_001005237.1 | 452 | 610 | c |
| 241 | OR51G2 | NP_001005238.1 | 453 | 611 | c |
| 242 | OR51I1 | NP_001005288.1 | 454 | 612 | c |
| 243 | OR51I2 | NP_001004754.1 | 455 | 613 | c |
| 244 | OR51J1 | NP_001335153.1 | 456 | 614 | c |
| 245 | OR51L1 | NP_001004755.1 | 457 | 615 | c |
| 246 | OR51M1 | NP_001004756.2 | 458 | 616 | c |
| 247 | OR51Q1 | NP_001004757.1 | 459 | 617 | c |
| 248 | OR51S1 | NP_001004758.1 | 460 | 618 | c |
| 249 | OR51T1 | NP_001004759.2 | 461 | 619 | c |
| 250 | OR51V1 | NP_001004760.3 | 462 | 620 | c |
| 251 | OR52A1 | NP_036507.2 | 463 | 621 | c |
| 252 | OR52A5 | NP_001005160.1 | 464 | 622 | c |
| 253 | OR52B2 | NP_001004052.1 | 465 | 623 | c |
| 254 | OR52B4 | NP_301005161.2 | 466 | 624 | c |
| 255 | OR52B6 | NP_001005162.2 | 467 | 625 | c |
| 256 | OR52D1 | NP_001005163.1 | 468 | 626 | c |
| 257 | OR52E5 | NP_001005166.3 | 469 | 627 | c |
| 258 | OR52E6 | NP_001005167.1 | 470 | 628 | d |
| 259 | OR52H1 | NP_001005289.2 | 471 | 629 | c |
| 260 | OR52I1 | NP_001005169.1 | 472 | 630 | c |
| 261 | OR52I2 | NP_001005170.1 | 473 | 631 | c |
| 262 | OR52J3 | NP_001001916.2 | 474 | 632 | c |
| 263 | OR52K1 | NP_001005171.2 | 475 | 633 | c |
| 264 | OR52K2 | NP_001005172.2 | 476 | 634 | c |
| 265 | OR52N1 | NP_001001913.1 | 477 | 635 | c |
| 266 | OR52R1 | NP_001005177.3 | 478 | 636 | c |
| 267 | OR52W1 | NP_001005178.1 | 479 | 637 | c |
| 268 | OR56A5 | NP_001139505.1 | 480 | 638 | c |
| 269 | OR56B4 | NP_001005181.1 | 481 | 639 | c |
| 270 | OR5AN1 | NP_001004729.1 | 482 | 640 | c |
| 271 | M71 | NP_997547.1 | 483 | 641 | c |
| 272 | OR9K2 | NP_001005243.2 | 484 | 642 | c |

TABLE 25-5

| | | | SEQ ID | SEQ ID | |
|---|---|---|---|---|---|
| | | | NO of | NO of | |
| | | | original | consensus | |
| | | | amino | amino | Consensus |
| | Olfactory | | acid | acid | design |
| No. | receptor | Accession No | sequence | sequence | method |
| 273 | OR2A2 | NP_001005480.2 | 801 | 851 | c |
| 274 | OR2A12 | NP_001004135.1 | 802 | 852 | c |
| 275 | OR4S1 | NP_001004725.1 | 803 | 853 | c |
| 276 | OR5AC2 | NP_473447.1 | 804 | 854 | c |
| 277 | OR5B3 | NP_001005469.1 | 805 | 855 | c |
| 278 | OR5D13 | NP_001001967.1 | 806 | 856 | c |
| 279 | OR5D14 | NP_001004735.1 | 807 | 857 | c |
| 280 | OR5D16 | NP_001005496.1 | 808 | 858 | c |
| 281 | OR5D18 | NP_001001952.1 | 809 | 859 | c |
| 282 | OR5J2 | NP_001005492.1 | 810 | 860 | c |
| 283 | OR5K4 | NP_001005517.1 | 811 | 861 | c |
| 284 | OR5L1 | NP_001004738.1 | 812 | 862 | c |
| 285 | OR5L2 | NP_001004739.1 | 813 | 863 | c |
| 286 | OR5M1 | NP_001004740.1 | 814 | 864 | c |
| 287 | OR5M3 | NP_001004742.2 | 815 | 865 | c |
| 288 | OR5M8 | NP_001005282.1 | 816 | 866 | c |
| 289 | OR5M9 | NP_001004743.1 | 817 | 867 | c |
| 290 | OR5M10 | NP_001004741.1 | 818 | 868 | c |
| 291 | OR5M11 | NP_001005245.1 | 819 | 869 | c |
| 292 | OR5P2 | NP_703145.1 | 820 | 870 | c |
| 293 | OR5T1 | NP_001004745.1 | 821 | 871 | c |
| 294 | OR5T2 | NP_001004746.2 | 822 | 872 | c |
| 295 | OR5T3 | NP_001004747.2 | 823 | 873 | c |
| 296 | OR6M1 | NP_001005325.1 | 824 | 874 | c |
| 297 | OR6N1 | NP_001005185.1 | 825 | 875 | c |
| 298 | OR6P1 | NP_001153797.1 | 826 | 876 | c |
| 299 | OR6Q1 | NP_001005186.2 | 827 | 877 | c |
| 300 | OR6T1 | NP_001005187.1 | 828 | 878 | c |
| 301 | OR6X1 | NP_001005188.1 | 829 | 879 | c |
| 302 | OR8B4 | NP_001005196.1 | 830 | 880 | c |
| 303 | OR8B8 | NP_036510.1 | 831 | 881 | c |
| 304 | OR8B12 | NP_001005195.1 | 832 | 882 | c |
| 305 | OR8D1 | NP_001002917.1 | 833 | 883 | c |
| 306 | OR8G1 | NP_001002905.1 | 834 | 884 | c |
| 307 | OR8G5 | NP_001005198.2 | 835 | 885 | c |
| 308 | OR8H2 | NP_001372993.1 | 836 | 886 | d |
| 309 | OR8I2 | NP_001003750.1 | 837 | 887 | c |
| 310 | OR8J1 | NP_001005205.2 | 838 | 888 | c |
| 311 | OR8K1 | NP_001002907.1 | 839 | 889 | c |
| 312 | OR8K3 | NP_001005202.1 | 840 | 890 | c |
| 313 | OR8K5 | NP_001004058.2 | 841 | 891 | c |
| 314 | OR8U1 | NP_001005204.1 | 842 | 892 | c |
| 315 | OR9G1 | NP_001005213.1 | 843 | 893 | c |
| 316 | OR9G4 | NP_001377761.1 | 844 | 894 | c |
| 317 | OR9I1 | NP_001005211.1 | 845 | 895 | c |
| 318 | OR11H12 | NP_001013372.1 | 846 | 896 | c |
| 319 | OR52M1 | NP_001004137.1 | 847 | 897 | c |
| 320 | OR52N5 | NP_001372591.1 | 848 | 898 | c |
| 321 | OR56A3 | NP_001003443.2 | 849 | 899 | c |
| 322 | OR5I1 | NP_006628.1 | 850 | 900 | c |

[0372] Thus, the present consensus design method enables functional analysis by actually increasing the cell membrane expression level of an olfactory receptor thereby improving the responsiveness of the olfactory receptor, or by improving the responsiveness of the olfactory receptor even if its cell membrane expression level is not increased. Also, the finding obtained by this method properly explains, for example, difference in sense of smell among individuals obtained in the preceding finding. Thus, the present method is useful, as mentioned in the beginning, for assessing the properties of a human sense of smell or providing a method for searching for a substance which can control a sense of smell.

The application's sequence listing, which the Patent Office published only in electronic form, follows.

SEQUENCE LISTING (950 sequences)

SEQ ID NO: 1 - protein, 310 aa, Homo sapiens
MGGNQTSITEFLLLGFPIGPRIQMLLFGLFSLFYIFILLGNGTILGLISLDSRLHTPMYFFLSHLAVVDIACACSTVPQMLVNLLHPAKPISFAGCMTQMFLFLSFAHTECLLLVVMSYDRYVAICHPLRYSTIMTWKVCITLALTSWILGVLLALVHLVLLLPLSFCGPQKLNHFFCEIMAVLKLACADTHINEVMVLAGAVSVLVGAFFSTVISYVHILCAILKIQSGEGCQKAFSICSSHLCVVGLFYGTAIIMYVEPQYESPKEQKKYLLLFHSLFNPMLNPLIYSLRNKEVQGTLKRMLEKKRTS

SEQ ID NO: 2 - protein, 316 aa, Homo sapiens
MELWNFTLGSGFILVGILNDSGSPELLCATITILYLLALISNGLLLLAITMEARLHMPMYLLLGQLSLMDLLFTSVVTPKALADFLRRENTISFGGCALQMFLALTMGGAEDLLLAFMAYDRYVAICHPLTYMTLMSSRACWLMVATSWILASLSALIYTVYTMHYPFCRAQEIRHLLCEIPHLLKVACADTSRYELMVYVMGVTFLIPSLAAILASYTQILLTVLHMPSNEGRKKALVTCSSHLTVVGMFYGAATFMYVLPSSFHSTRQDNIISVFYTIVTPALNPLIYSLRNKEVMRALRRVLGKYMLPAHSTL

SEQ ID NO: 3 - protein, 316 aa, Homo sapiens
MELRNSTLGSGFILVGILNDSGSPELLYATFTILYMLALTSNGLLLLAITIEARLHMPMYLLLGQLSLMDLLFTSVVTPKALADFLRRENTISFGGCALQMFLALTMGSAEDLLLAFMAYDRYVAICHPLKYMTLMSPRVCWIMVATSWILASLIAIGHTMYTMHLPFCVSWEIRHLLCEIPPLLKLACADTSRYELIIYVTGVTFLLLPISAIVASYTLVLFTVLRMPSNEGRKKALVTCSSHLIVVGMFYGAATFMYVLPSSFHSPKQDNIISVFYTIVTPALNPLIYSLRNKEVMRALRRVLGKYILLAHSTL

SEQ ID NO: 4 - protein, 308 aa, Homo sapiens
MRQINQTQVTEFLLLGLSDGPHTEQLLFIVLLGVYLVTVLGNLLLISLVHVDSQLHTPMYFFLCNLSLADLCFSTNIVPQALVHLLSRKKVIAFTLCAARLLFFLIFGCTQCALLAVMSYDRYVAICNPLRYPNIMTWKVCVQLATGSWTSGILVSVVDTTFILRLPYRGSNSIAHFFCEAPALLILASTDTHASEMAIFLMGVVILLIPVFLILVSYGRIIVTVVKMKSTVGSLKAFSTCGSHLMVVILFYGSAIITYMTPKSSKQQEKSVSVFYAIVTPMLNPLIYSLRNKDVKAALRKVATRNFP

SEQ ID NO: 5 - protein, 330 aa, Homo sapiens
MCSFFLCQTGKQAKISMGEENQTFVSKFIFLGLSQDLQTQILLFILFLIIYLLTVLGNQLIIILIFLDSRLHTPMYFFLRNLSFADLCFSTSIVPQVLVHFLVKRKTISFYGCMTQIIVFLLVGCTECALLAVMSYDRYVAVCKPLYYSTIMTQRVCLWLSFRSWASGALVSLVDTSFTFHLPYWGQNIINHYFCEPPALLKLASIDTYSTEMAIFSMGVVILLAPVSLILGSYWNIISTVIQMQSGEGRLKAFSTCGSHLIVVVLFYGSGIFTYMRPNSKTTKELDKMISVFYTAVTPMLNPIIYSLRNKDVKGALRKLVGRKCFSHRQ

SEQ ID NO: 6 - protein, 316 aa, Homo sapiens
MTNTSSSDFTLLGLLVNSEAAGIVFTVILAVFLGAVTANLVMIFLIQVDSRLHTPMYFLLSQLSIMDTLFICTTVPKLLADMVSKEKIISFVACGIQIFLYLTMIGSEFFLLGLMAYDCYVAVCNPLRYPVLMNRKKCLLLAAGAWFGGSLDGFLLTPITMNVPYCGSRSINHFFCEIPAVLKLACADTSLYETLMYICCVLMLLIPISIISTSYSLILLTIHRMPSAEGRKKAFTTCSSHLTVVSIFYGAAFYTYVLPQSFHTPEQDKVVSAFYTIVTPMLNPLIYSLRNKDVIGAFKKVFACCSSAQKVATSDA

SEQ ID NO: 7 - protein, 320 aa, Homo sapiens
MDQSNYSSLHGFILLGFSNHPKMEMILSGVVAIFYLITLVGNTAIILASLLDSQLHTPMYFFLRNLSFLDLCFTTSIIPQMLVNLWGPDKTISYVGCIIQLYVYMWLGSVECLLLAVMSYDRFTAICKPLHYFVVMNPHLCLKMIIMIWSISLANSVVLCTLTLNLPTCGNNILDHFLCELPALVKIACVDTTTVEMSVFALGIIIVLTPLILILISYGYIAKAVLRTKSKASQRKAMNTCGSHLTVVSMFYGTIIYMYLQPGNRASKDQGKFLTLFYTVITPSLNPLIYTLRNKDMKDALKKLMRFHHKSTKIKRNCKS

SEQ ID NO: 8 - protein, 314 aa, Homo sapiens
MDGTNGSTQTHFILLGFSDRPHLERILFVVILIAYLLTLVGNTTIILVSRLDPHLHTPMYFFLAHLSFLDLSFTTSSIPQLLYNLNGCDKTISYMGCAIQLFLFLGLGGVECLLLAVMAYDRCVAICKPLHYMVIMNPRLCRGLVSVTWGCGVANSLAMSPVTLRLPRCGHHEVDHFLREMPALIRMACVSTVAIEGTVFVLAVGVVLSPLVFILLSYSYIVRAVLQIRSASGRQKAFGTCGSHLTVVSLFYGNIIYMYMQPGASSSQDQGMFLMLFYNIVTPLLNPLIYTLRNREVKGALGRLLLGKRELGKE

SEQ ID NO: 9 - protein, 311 aa, Homo sapiens
MGSFNTSFEDGFILVGFSDWPQLEPILFVFIFIFYSLTLFGNTIIIALSWLDLRLHTPMYFFLSHLSLLDLCFTTSTVPQLLINLCGVDRTITRGGCVAQLFIYLALGSTECVLLVVMAFDRYAAVCRPLHYMAIMHPHLCQTLAIASWGAGFVNSLIQTGLAMAMPLCGHRLNHFFCEMPVFLKLACADTEGTEAKMFVARVIVVAVPAALILGSYVHIAHAVLRVKSTAGRRKAFGTCGSHLLVVFLFYGSAIYTYLQSIHNYSEREGKFVALFYTIITPILNPLIYTLRNKDVKGALWKVLWRGRDSG

SEQ ID NO: 10 - protein, 321 aa, Homo sapiens
MSLQKLMEPEAGTNRTAVAEFILLGLVQTEEMQPVVFVLLLFAYLVTTGGNLSILAAVLVEPKLHAPMYFFLGNLSVLDVGCITVTVPAMLGRLLSHKSTISYDACLSQLFFFHLLAGMDCFLLTAMAYDRLLAICQPLTYSTRMSQTVQRMLVAASLACAFTNALTHTVAMSTLNFCGPNEVNHFYCDLPQLFQLSCSSTQLNELLLFAVGFIMAGTPLVLIITAYSHVAAAVLRIRSVEGRKKAFSTCGSHLTVVCLFFGRGIFNYMRLGSEEASDKDKGVGVFNTVINPMLNPLIYSLRNPDVQGALWQIFLGRRSLT

SEQ ID NO: 11 - protein, 328 aa, Homo sapiens
MRPSSNVTEFVLLGLTQDPDVKKTLFVMFLLIYIVTMVGNLLIWVTTIGSPSLGSLMYFFLAYLSLMDAIYSTAMSPKLMIDLLCDKIAISLSACMGQLFIEHLLGGAEVFLLVVMAYDRYVAISKPLHYLNIMNRLVCILLLVVAMIGGFVHSVVQIVFLYSLPICGPNVIDHSVCDMYPLLELLCLDTYFIGLTVVANGGIICMVIFTFLLISCGVILNFLKTYSQEERHKALPTCISHIIVVALVFVPCIFMYVRPVSNFPFDKLMTVFYSIITLMLNPLIYSLRQSEMKNAMKNLWCEKLSIVRKRVSPTLNIFIPSSKATNRR

SEQ ID NO: 12 - protein, 316 aa, Homo sapiens
MQNQSFVTEFVLLGLSQNPNVQEIVFVVFLFVYIATVGGNMLIVVTILSSPALLVSPMYFFLGFLSFLDACFSSVITPKMIVDSLYVTKTISFEGCMMQLFAEHFFAGVEVIVLTAMAYDRYVAICKPLHYSSIMNRRLCGILMGVAWTGGLLHSMIQILFTFQLPFCGPNVINHFMCDLYPLLELACTDTHIFGLMVVINSGFICIINFSLLLVSYAVILLSLRTHSSEGRWKALSTCGSHIAVVILFFVPCIFVYTRPPSAFSLDKMAAIFYIILNPLLNPLIYTFRNKEVKQAMRRIWNRLMVVSDEKENIKL

SEQ ID NO: 13 - protein, 318 aa, Homo sapiens
MNPANHSQVAGFVLLGLSQVWELRFVFFTVFSAVYFMTVVGNLLIVVIVTSDPHLHTTMYFLLGNLSFLDFCYSSITAPRMLVDLLSGNPTISFGGCLTQLFFFHFIGGIKIFLLTVMAYDRYIAISQPLHYTLIMNQTVCALLMAASWVGGFIHSIVQIALTIQLPFCGPDKLDNFYCDVPQLIKLACTDTFVLELLMVSNNGLVTLMCFLVLLGSYTALLVMLRSHSREGRSKALSTCASHIAVVTLIFVPCIYVYTRPFRTFPMDKAVSVLYTIVTPMLNPAIYTLRNKEVIMAMKKLWRRKKDPIGPLEHRPLH

SEQ ID NO: 14 - protein, 314 aa, Homo sapiens
MDQINHTNVKEFFFLELTRSRELEFFLFVVFFAVYVATVLGNALIVVTITCESRLHTPMYFLLRNKSVLDIVFSSITVPKFLVDLLSDRKTISYNDCMAQIFFFHFAGGADIFFLSVMAYDRYLAIAKPLHYVTMMRKEVWVALVVASWVSGGLHSIIQVILMLPFPFCGPNTLDAFYCYVLQVVKLACTDTFALELFMISNNGLVTLLWFLLLLGSYTVILVMLRSHSGEGRNKALSTCTSHMLVVTLHFVPCVYIYCRPFMTLPMDTTISINNTVITPMLNPIIYSLRNQEMKSAMQRLQRRLGPSESRKWG

SEQ ID NO: 15 - protein, 312 aa, Homo sapiens
MNGMNHSVVSEFVFMGLTNSREIQLLLFVFSLLFYFASMMGNLVIVFTVTMDAHLHSPMYFLLANLSIIDMAFCSITAPKMICDIFKKHKAISFRGCITQIFFSHALGGTEMVLLIAMAFDRYMAICKPLHYLTIMSPRMCLYFLATSSIIGLIHSLVQLVFVVDLPFCGPNIFDSFYCDLPRLLRLACTNTQELEFMVTVNSGLISVGSFVLLVISYIFILFTVWKHSSGGLAKALSTLSAHVTVVILFFGPLMFFYTWPSPTSHLDKYLAIFDAFITPFLNPVIYTFRNKDMKVAMRRLCSRLAHFTKIL

SEQ ID NO: 16 - protein, 348 aa, Homo sapiens
MLTSLTDLCFSPIQVAEIKSLPKSMNETNHSRVTEFVLLGLSSSRELQPFLFLTFSLLYLAILLGNFLIILTVTSDSRLHTPMYFLLANLSFIDVCVASFATPKMIADFLVERKTISFDACLAQIFFVHLFTGSEMVLLVSMAYDRYVAICKPLHYMTVMSRRVCVVLVLISWFVGFIHTTSQLAFTVNLPFCGPNKVDSFFCDLPLVTKLACIDTYVVSLLIVADSGFLSLSSFLLLVVSYTVILVTVRNRSSASMAKARSTLTAHITVVTLFFGPCIFIYVWPFSSYSVDKVLAVFYTIFTLILNPVIYTLRNKEVKAAMSKLKSRYLKPSQVSVVIRNVLFLETK

SEQ ID NO: 17 - protein, 313 aa, Homo sapiens
MKKEQDSNVTEFVLLGLSSSWELQLFLFLLFLFFYIAIVLGNLLIVVTVQAHAHLLQSPMYYFLGHLSFIDLCLSCVTVPKMLGDFLQQGKSISFSGCLAQIYFLHFLGASEMFLLTVMAYDRYVAICNPLRYLTVMNPQLCLWLVLACWCGGFIHSIMQVILVIQLPFCGPNELDNFYCDVPQVIKLACMDTYVVEVLVIANSGLLSLVCFLVLLFSYAIILITLRTHFCQGQNKVFSTCASHLTVVSLIFVPCVFIYLRPFCSFSVDKIFSLFYTVITPMLNPLIYTLRNTDMKTAMKKLRIKPCGIPLPC

SEQ ID NO: 18 - protein, 311 aa, Homo sapiens
MEKINNVTEFIFWGLSQSPEIEKVCFVVFSFFYIIILLGNLLIMLTVCLSNLFKSPMYFFLSFLSFVDICYSSVTAPKMIVDLLAKDKTISYVGCMLQLFGVHFFGCTEIFILTVMAYDRYVAICKPLHYMTIMNRETCNKMLLGTWVGGFLHSIIQVALVVQLPFCGPNEIDHYFCDVHPVLKLACTETYIVGVVVTANSGTIALGSFVILLISYSIILVSLRKQSAEGRRKALSTCGSHIAMVVIFFGPCTFMYMRPDTTFSEDKMVAVFYTIITPMLNPLIYTLRNAEVKNAMKKLWGRNVFLEAKGK

SEQ ID NO: 19 - protein, 324 aa, Homo sapiens
MAVGRNNTIVTKFILLGLSDHPQMKIFLFMLFLGLYLLTLAWNLSLIALIKMDSHLHMPMYFFLSNLSFLDICYVSSTAPKMLSDIITEQKTISFVGCATQYFVFCGMGLTECFLLAAMAYDRYAAICNPLLYTVLISHTLCLKMVVGAYVGGFLSSFIETYSVYQHDFCGPYMINHFFCDLPPVLALSCSDTFTSEVVTFIVSVVVGIVSVLVVLISYGYIVAAVVKISSATGRTKAFSTCASHLTAVTLFYGSGFFMYMRPSSSYSLNRDKVVSIFYALVIPVVNPIIYSFRNKEIKNAMRKAMERDPGISHGGPFIFMTLG

SEQ ID NO: 20 - protein, 320 aa, Homo sapiens
MNSENLTRAAVAPAEFVLLGITNRWDLRVALFLTCLPVYLVSLLGNMGMALLIRMDARLHTPMYFFLANLSLLDACYSSAIGPKMLVDLLLPRATIPYTACALQMFVFAGLADTECCLLAAMAYDRYVAIRNPLLYTTAMSQRLCLALLGASGLGGAVSAFVHTTLTFRLSFCRSRKINSFFCDIPPLLAISCSDTSLNELLLFAICGFIQTATVLAITVSYGFIAGAVIHMRSVEGSRRAASTGGSHLTAVAMMYGTLIFMYLRPSSSYALDTDKMASVFYTLVIPSLNPLIYSLRNKEVKEALRQTWSRFHCPGQGSQ

SEQ ID NO: 21 - protein, 310 aa, Homo sapiens
MDWENCSSLTDFFLLGITNNPEMKVTLFAVFLAVYIINFSANLGMIVLIRMDYQLHTPMYFFLSHLSFCDLCYSTATGPKMLVDLLAKNKSIPFYGCALQFLVFCIFADSECLLLSVMAFDRYKAIINPLLYTVNMSSRVCYLLLTGVYLVGIADALIHMTLAFRLCFCGSNEINHFFCDIPPLLLLSRSDTQVNELVLFTVFGFIELSTISGVFISYCYIILSVLEIHSAEGRFKALSTCTSHLSAVAIFQGTLLFMYFRPSSSYSLDQDKMTSLFYTLVVPMLNPLIYSLRNKDVKEALKKLKNKILF

SEQ ID NO: 22 - protein, 327 aa, Homo sapiens
MEWRNHSGRVSEFVLLGFPAPAPLQVLLFALLLLAYVLVLTENTLIIMAIRNHSTLHKPMYFFLANMSFLEIWYVTVTIPKMLAGFVGSKQDHGQLISFEGCMTQLYFFLGLGCTECVLLAVMAYDRYMAICYPLHYPVIVSGRLCVQMAAGSWAGGFGISMVKVFLISGLSYCGPNIINHFFCDVSPLLNLSCTDMSTAELTDFILAIFILLGPLSVTGASYVAITGAVMHIPSAAGRYKAFSTCASHLTVVIIFYAASIFIYARPKALSAFDTNKLVSVLYAVIVPLLNPIIYCLRNQEVKRALCCTLHLYQHQDPDPKKASRNV

SEQ ID NO: 23 - protein, 312 aa, Homo sapiens
MSGENVTKVSTFILVGLPTAPGLQYLLFLLFLLTYLFVLVENLAIILIVWSSTSLHRPMYYFLSSMSFLEIWYVSDITPKMLEGFLLQQKRISFVGCMTQLYFFSSLVCTECVLLASMAYDRYVAICHPLRYHVLVTPGLCLQLVGFSFVSGFTISMIKVCFISSVTFCGSNVLNHFFCDISPILKLACTDFSTAELVDFILAFIILVFPLLATILSYWHITLAVLRIPSATGCWRAFSTCASHLTVVTVFYTALLFMYVRPQAIDSQSSNKLISAVYTVVTPIINPLIYCLRNKEFKDALKKALGLGQTSH

SEQ ID NO: 24 - protein, 312 aa, Homo sapiens
MRNHTEITEFILLGLTDDPNFQVVIFVFLLITYMLSITGNLTLITITLLDSHLQTPMYFFLRNFSILEISFTTVSIPKFLGNIISGDKTISFNNCIVQLFFFILLGVTEFYLLAAMSYDRYVAICKPLHCLSIMNRRVCTLLVFTSWLVSFLIIFPALMLLLKLHYCRSNIIDHFTCDYFPLLQLACSDTKFLEVMGFSCAAFTLMFTLALIFLSYIYIIRTILRIPSTSQRTKAFSTCSSHMVVVSISYGSCIFMYIKPSAKDRVSLSKGVAILNTSVAPMMNPFIYSLRNQQVKQAFINMARKTVFFTST

SEQ ID NO: 25 - protein, 325 aa, Homo sapiens
MTTIILEVDNHTVTTRFILLGFPTRPAFQLLFFSIFLATYLLTLLENLLIILAIHSDGQLHKPMYFFLSHLSFLEMWYVTVISPKMLVDFLSHDKSISFNGCMTQLYFFVTFVCTEYILLAIMAFDRYVAICNPLRYPVIMTNQLCGTLAGGCWFCGLMTAMIKMVFIAQLHYCGMPQINHYFCDISPLLNVSCEDASQAEMVDFFLALMVIAIPLCVVVASYAAILATILRIPSAQGRQKAFSTCASHLTVVILFYSMTLFTYARPKLMYAYNSNKVVSVLYTVIVPLLNPIIYCLRNHEVKAALRKTIHCRGSGPQGNGAFSS

SEQ ID NO: 26 - protein, 309 aa, Homo sapiens
MEPENDTGISEFVLLGLSEEPELQPFLFGLFLSMYLVTVLGNLLIILATISDSHLHTPMYFFLSNLSFADICFISTTIPKMLINIQTQSRVITYAGCITQMCFFVLFGGLDSLLLAVMAYDRFVAICHPLHYTVIMNPRLCGLLVLASWMIAALNSLSQSLMVLWLSFCTDLEIPHFFCELNQVIHLACSDTFLNDMGMYFAAGLLAGGPLVGILCSYSKIVSSIRAISSAQGKYKAFSTCASHLSVVSLFCCTGLGVYLTSAATHNSHTSATASVMYTVATPMLNPFIYSLRNKDIKRALKMSFRGKQ

SEQ ID NO: 27 - protein, 312 aa, Homo sapiens
MEAENLTELSKFLLLGLSDDPELQPVLFGLFLSMYLVTVLGNLLIILAVSSDSHLHTPMYFFLSNLSFVDICFISTTVPKMLVSIQARSKDISYMGCLTQVYFLMMFAGMDTFLLAVMAYDRFVAICHPLHYTVIMNPCLCGLLVLASWFIIFWFSLVHILLMKRLTFSTGTEIPHFFCEPAQVLKVACSNTLLNNIVLYVATALLGVFPVAGILFSYSQIVSSLMGMSSTKGKYKAFSTCGSHLCVVSLFYGTGLGVYLSSAVTHSSQSSSTASVMYAMVTPMLNPFIYSLRNKDVKGALERLLSRADSCP

SEQ ID NO: 28 - protein, 303 aa, Homo sapiens
MSFSSLPTEIQSLLFLTFLTIYLVTLMGNCLIILVTLADPMLHSPMYFFLRNLSFLEIGFNLVIVPKMLGTLLAQDTTISFLGCATQMYFFFFFGVAECFLLATMAYDRYVAICSPLHYPVIMNQRTRAKLAAASWFPGFPVATVQTTWLFSFPFCGTNKVNHFFCDSPPVLRLVCADTALFEIYAIVGTILVVMIPCLLILCSYTHIAAAILKIPSAKGKNKAFSTCSSHLLVVSLFYISLSLTYFRPKSNNSPEGKKLLSLSYTVMTPMLNPIIYSLRNNEVKNALSRTVSKALALRNCIP

SEQ ID NO: 29 - protein, 315 aa, Homo sapiens [sequence omitted]

SEQ ID NO: 30 - protein, 312 aa, Homo sapiens
MEVKNCCMVTEFILLGIPHTEGLEMTLFVLFLPFYACTLLGNVSILVAVMSSARLHTPMYFFLGNLSVFDMGFSSVTCPKMLLYLMGLSRLISYKDCVCQLFFFHFLGSIECFLFTVMAYDRFTAICYPLRYTVIMNPRICVALAVGTWLLGCIHSSILTSLTFTLPYCGPNEVDHFFCDIPALLPLACADTSLAQRVSFTNVGLISLVCFLLILLSYTRITISILSIRTTEGRRRAFSTCSAHLIAILCAYGPIITVYLQPTPNPMLGTVVQILMNLVGPMLNPLIYTLRNKEVKTALKTILHRTGHVPES

SEQ ID NO: 31 - protein, 319 aa, Homo sapiens
MPVGKLVFNQSEPTEFVFRAFTTATEFQVLLFLLFLLLYLMILCGNTAIIWVVCTHSTLRTPMYFFLSNLSFLELCYTTVVVPLMLSNILGAQKPISLAGCGAQMFFFVTLGSTDCFLLAIMAYDRYVAICHPLHYTLIMTRELCTQMLGGALGLALFPSLQLTALIFTLPFCGHHQEINHFLCDVPPVLRLACADIRVHQAVLYVVSILVLTIPFLLICVSYVFITCAILSIRSAEGRRRAFSTCSFHLTVVLLQYGCCSLVYLRPRSSTSEDEDSQIALVYTFVTPLLNPLLYSLRNKDVKGALRSAIIRKAASDAN

SEQ ID NO: 32 - protein, 313 aa, Homo sapiens
MGQTNVTSWRDFVFLGFSSSGELQLLLFALFLSLYLVTLTSNVFIIIAIRLDSHLHTPMYLFLSFLSFSETCYTLGIIPRMLSGLAGGDQAISYVGCAAQMFFSASWACTNCFLLAAMGFDRYVAICAPLHYASHMNPTLCAQLVITSFLTGYLFGLGMTLVIFHLSFCSSHEIQHFFCDTPPVLSLACGDTGPSELRIFILSLLVLLVSFFFITISYAYILAAILRIPSAEGQKKAFSTCASHLTVVIIHYGCASFVYLRPKASYSLERDQLIAMTYTVVTPLLNPIVYSLRNRAIQTALRNAFRGRLLGKG

SEQ ID NO: 33 - protein, 326 aa, Homo sapiens
MCPLTLQVTGLMNVSEPNSSFAFVNEFILQGFSCEWTIQIFLFSLFTTTYALTITGNGAIAFVLWCDRRLHTPMYMFLGNFSFLEIWYVSSTVPKMLVNFLSEKKNISFAGCFLQFYFFFSLGTSECLLLTVMAFDQYLAICRPLLYPNIMTGHLYAKLVILCWVCGFLWFLIPIVLISQMPFCGPNIIDHVVCDPGPRFALDCVSAPRIQLFCYTLSSLVIFGNFLFIIGSYTLVLKAMLGMPSSTGRHKAFSTCGSHLAVVSLCYSSLMVMYVSPGLGHSTGMQKIETLFYAMVTPLFNPLIYSLQNKEIKAALRKVLGSSNII

SEQ ID NO: 34 - protein, 324 aa, Homo sapiens
MSFFFVDLRPMNRSATHIVTEFILLGFPGCWKIQIFLFSLFLVIYVLTLLGNGAIIYAVRCNPLLHTPMYFLLGNFAFLEIWYVSSTIPNMLVNILSKTKAISFSGCFLQFYFFFSLGTTECLFLAVMAYDRYLAICHPLQYPAIMTVRFCGKLVSFCWLIGFLGYPIPIFYISQLPFCGPNIIDHFLCDMDPLMALSCAPAPITECIFYTQSSLVLFFTSMYILRSYILLLTAVFQVPSAAGRRKAFSTCGSHLVVVSLFYGTVMVMYVSPTYGIPTLLQKILTLVYSVTTPLFNPLIYTLRNKDMKLALRNVLFGMRIRQNS

SEQ ID NO: 35 - protein, 320 aa, Homo sapiens
MERTNDSTSTEFFLVGLSAHPKLQTVFFVLILWMYLMILLGNGVLISVIIFDSHLHTPMYFFLCNLSFLDVCYTSSSVPLILASFLAVKKKVSFSGCMVQMFISFAMGATECMILGTMALDRYVAICYPLRYPVIMSKGAYVAMAAGSWVTGLVDSVVQTAFAMQLPFCANNVIKHFVCEILAILKLACADISINVISMTGSNLIVLVIPLLVISISYIFIVATILRIPSTEGKHKAFSTCSAHLTVVIIFYGTIFFMYAKPESKASVDSGNEDIIEALISLFYGVMTPMLNPLIYSLRNKDVKAAVKNILCRKNFSDGK

SEQ ID NO: 36 - protein, 307 aa, Homo sapiens
MNHSVVTEFIILGLTKKPELQGIIFLFFLIVYLVAFLGNMLIIIAKIYNNTLHTPMYVFLLTLAVVDIICTTSIIPKMLGTMLTSENTISYAGCMSQLFLFTWSLGAEMVLFTTMAYDRYVAICFPLHYSTIMNHHMCVALLSMVMAIAVTNSWVHTALIMRLTFCGPNTIDHFFCEIPPLLALSCSPVRINEVMVYVADITLAIGDFILTCISYGFIIVAILRIRTVEGKRKAFSTCSSHLTVVTLYYSPVIYTYIRPASSYTFERDKVVAALYTLVTPTLNPMVYSFQNREMQAGIRKVFAFLKH

SEQ ID NO: 37 - protein, 304 aa, Homo sapiens [sequence omitted]

SEQ ID NO: 38 - protein, 313 aa, Homo sapiens
MASPSNDSTAPVSEFLLICFPNFQSWQHWLSLPLSLLFLLAMGANTTLLITIQLEASLHQPLYYLLSLLSLLDIVLCLTVIPKVLAIFWFDLRSISFPACFLQMFIMNSFLTMESCTFMVMAYDRYVAICHPLRYPSIITDQFVARAVVFVIARNAFVSLPVPMLSARLRYCAGNIIKNCICSNLSVSKLSCDDITFNQLYQFVAGWTLLGSDLILIVISYSFILKVVLRIKAEGAVAKALSTCGSHFILILFFSTVLLVLVITNLARKRIPPDVPILLNILHHLIPPALNPIVYGVRTKEIKQGIQNLLKRL

SEQ ID NO: 39 - protein, 317 aa, Homo sapiens
MKSDNHSFLGDSPKAFILLGVSDRPWLELPLFVVLLLSYVLAMLGNVAIILASRVDPQLHSPMYIFLSHLSFLDLCYTTTTVPQMLVNMGSSQKTISYGGCTVQYAVFHWLGCTECIVLAAMALDRYVAICKPLHYAVLMHRALCQQLVALAWLSGFGNSFVQVVLTVQLPFCGRQVLNNFFCEVPAVIKLSCADTAVNDTILAVLVAFFVLVPLALILLSYGFIARAVLRIQSSKGRHKAFGTCSSHLMIVSLFYLPAIYMYLQPPSSYSQEQGKFISLFYSIITPTLNPFTYTLRNKDMKGALRRLLARIWRLCG

SEQ ID NO: 40 - protein, 320 aa, Homo sapiens
MMEIANVSSPEVFVLLGFSTRPSLETVLFIVVLSFYMVSILGNGIIILVSHTDVHLHTPMYFFLANLPFLDMSFTTSIVPQLLANLWGPQKTISYGGCVVQFYISHWLGATECVLLATMSYDRYAAICRPLHYTVIMHPQLCLGLALASWLGGLTTSMVGSTLTMLLPLCGNNCIDHFFCEMPLIMQLACVDTSLNEMEMYLASFVFVVLPLGLILVSYGHIARAVLKIRSAEGRRKAFNTCSSHVAVVSLFYGSIIFMYLQPAKSTSHEQGKFIALFYTVVTPALNPLIYTLRNTEVKSALRHMVLENCCGSAGKLAQI

SEQ ID NO: 41 - protein, 317 aa, Homo sapiens
MGMVRHTNESNLAGFILLGFSDYPQLQKVLFVLILILYLLTILGNTTIILVSRLEPKLHMPMYFFLSHLSFLYRCFTSSVIPQLLVNLWEPMKTIAYGGCLVHLYNSHALGSTECVLPAVMSCDRYVAVCRPLHYTVLMHIHLCMALASMAWLSGIATTLVQSTLTLQLPFCGHRQVDHFICEVPVLIKLACVGTTFNEAELFVASILFLIVPVSFILVSSGYIAHAVLRIKSATRRQKAFGTCFSHLTVVTIFYGTIIFMYLQPAKSRSRDQGKFVSLFYTVVTRMLNPLIYTLRIKEVKGALKKVLAKALGVNIL

SEQ ID NO: 42 - protein, 309 aa, Homo sapiens
MGLGNESSLMDFILLGFSDHPRLEAVLFVFVLFFYLLTLVGNFTIIIISYLDPPLHTPMYFFLSNLSLLDICFTTSLAPQTLVNLQRPKKTITYGGCVAQLYISLALGSTECILLADMALDRYIAVCKPLHYVVIMNPRLCQQLASISWLSGLASSLIHATFTLQLPLCGNHRLDHFICEVPALLKLACVDTTVNELVLFVVSVLFVVIPPALISISYGFITQAVLRIKSVEARHKAFSTCSSHLTVVIIFYGTIIYVYLQPSDSYAQDQGKFISLFYTMVTPTLNPIIYTLRNKDMKEALRKLLSGKL

SEQ ID NO: 43 - protein, 312 aa, Homo sapiens
MENYNQTSTDFILLGLFPQSRIGLFVFTLIFLIFLMALIGNLSMILLIFLDIHLHTPMYFLLSQLSLIDLNYISTIVPKMVYDFLYGNKSISFTGCGIQSFFFLTLAVAEGLLLTSMAYDRYVAICFPLHYPIRISKRVCVMMITGSWMISSINSCAHTVYALCIPYCKSRAINHFFCDVPAMLTLACTDTWVYESTVFLSSTIFLVLPFTGIACSYGRVLLAVYRMHSAEGRKKAYSTCSTHLTVVSFYYAPFAYTYVRPRSLRSPTEDKILAVFYTILTPMLNPIIYSLRNKEVMGALTQVIQKIFSVKM

SEQ ID NO: 44 - protein, 312 aa, Homo sapiens
MENYNQTSTDFILLGFFPPSRIGLFLFILIVFIFLMALIGNLSMILLIFLDTHLHTPMYFLLSQLSLIDLNYISTIVPKMASDFLSGNKSISFTGCGIQSFFFSALGGAEALLLASMAYDRYIAICFPLHYPIRMSKRMCVLMITGSWIIGSINACAHTVYVLHIPYCQSRAINHFFCDVPAMVTLACMDTWVYEGTVFLSTTIFLVFPFIAISCSYGRVLLAVYHMKSAEGRKKAYLTCSTHLTVVTFYYAPFVYTYLRPRSLRSPTEDKVLAVFYTTLTPMLNPIIYSLRNKEVMGALTRVSQRICSGKM

SEQ ID NO: 45 - protein, 312 aa, Homo sapiens
MENYNQTSTDFILLGLFPPSKIGLFLFILFVLIFLMALIGNLSMILLIFLDTHLHTPMYFLLSQLSLIDLNYISTIVPKMASDFLYGNKSISFIGCGIQSFFFMTFAGAEALLLTSMAYDRYVAICFPLHYPIRMSKRMYVLMITGSWMIGSINSCAHTVYAFRIPYCKSRAINHFFCDVPAMLTLACTDTWVYEYTVFLSSTIFLVFPFTGIACSYGWVLLAVYRMHSAEGRKKAYSTCSTHLTVVTFYYAPFAYTYLCPRSLRSLTEDKVLAVFYTILTPMLNPIIYSLRNKEVMGALTRVIQNIFSVKM

SEQ ID NO: 46 - protein, 312 aa, Homo sapiens
MENYNQTSTDFILLGLFPPSRIDLFFFILIVFIFLMALIGNLSMILLIFLDTHLHTPMYFLLSQLSLIDLNYISTIVPKMASDFLHGNKSISFTGCGIQSFFFLALGGAEALLLASMAYDRYIAICFPLHYLIRMSKRVCVLMITGSWIIGSINACAHTVYVLHIPYCRSRAINHFFCDVPAMVTLACMDTWVYEGTVFLSATIFLVFPFIGISCSYGQVLFAVYHMKSAEGRKKAYLTCSTHLTVVTFYYAPFVYTYLRPRSLRSPTEDKVLAVFYTILTPMLNPIIYSLRNKEVMGALTRVSQRICSVKM

SEQ ID NO: 47 - protein, 312 aa, Homo sapiens
MEKWNHTSNDFILLGLLPPNQTGIFLLCLIILIFFLASVGNSAMIHLIHVDPRLHTPMYFLLSQLSLMDLMYISTTVPKMAYNFLSGQKGISFLGCGVQSFFFLTMACSEGLLLTSMAYDRYLAICHSLYYPIRMSKMMCVKMIGGSWTLGSINSLAHTVFALHIPYCRSRAIDHFFCDVPAMLLLACTDTWVYEYMVFVSTSLFLLFPFIGITSSCGRVLFAVYHMHSKEGRKKAFTTISTHLTVVIFYYAPFVYTYLRPRNLRSPAEDKILAVFYTILTPMLNPIIYSLRNKEVLGAMRRVFGIFSFLKE

SEQ ID NO: 48 - protein, 347 aa, Homo sapiens
MAWENQTFNSDFILLGIFNHSPPHTFLFFLVLGIFLVAFMGNSVMVLLIYLDTQLHTPMYFLLSQLSLMDLMLICTTVPKMAFNYLSGSKSISMAGCVTQIFFYISLSGSECFLLAVMAYDRYIAICHPLRYTNLMNPKICGLMATFSWILGSTDGIIDAVATFSFSFCGSREIAHFFCEFPSLLILSCNDTSIFEEVIFICCIVMLVFPVAIIIASYARVILAVIHMGSGEGRCKAFTTCSSHLMVVGMYYGAALFMYIRPTSDHSPTQDKMVSVFYTILTPMLNPLIYSLRNKEVTRAFMKILGKGKSESELPHKLYVLLFAKFFFLISIFFYDVKILALIMYIA

SEQ ID NO: 49 - protein, 311 aa, Homo sapiens
MVWENQTFNSIFILLGIFNHSPTHTFLFSLVLGIFSLALMENISMVLLIYIEKQLHTPMYFLLSQLSLMDLMLICTTLPKMIFSYLSGKKSISLAGCGTQIFFYVSLLGAECFLLAVMAYDRYVAICHPLQYTILMNPKLCVFMTVASWTLGSLDGIIVLAAVLSFSYCSSLEIHHFFCDVAALLPLSCTETSAFERLLVICCVVMLIFPVSVIILSYSHVLRAVIHMGSGESRRKAFTTCSSHLSVVGLYYGAAMFMYMRPASKHTPDQDKMVSAFYTILTPMLNPLIYSLRNKEVFRALQKVLKKRKLI

SEQ ID NO: 50 - protein, 318 aa, Homo sapiens
MEEYNTSSTDFTFMGLFNRKETSGLIFAIISIIFFTALMANGVMIFLIQTDLRLHTPMYFLLSHLSLIDMMYISTIVPKMLVNYLLDQRTISFVGCTAQHFLYLTLVGAEFFLLGLMAYDRYVAICNPLRYPVLMSRRVCWMIIAGSWFGGSLDGFLLTPITMSFPFCNSREINHFFCEAPAVLKLACADTALYETVMYVCCVLMLLIPFSVVLASYARILTTVQCMSSVEGRKKAFATCSSHMTVVSLFYGAAMYTYMLPHSYHKPAQDKVLSVFYTILTPMLNPLIYSLRNKDVTGALKRALGRFKGPQRVSGGVF

SEQ ID NO: 51 - protein, 320 aa, Homo sapiens
MANITWMANHTGWSDFILLGLFRQSKHPALLCVVIFVVFLMALSGNAVLILLIHCDAHLHTPMYFFISQLSLMDMAYISVTVPKMLLDQVMGVNKISAPECGMQMFFYVTLAGSEFFLLATMAYDRYVAICHPLRYPVLMNHRVCLFLSSGCWFLGSVDGFTFTPITMTFPFRGSREIHHFFCEVPAVLNLSCSDTSLYEIFMYLCCVLMLLIPVVIISSSYLLILLTIHGMNSAEGRKKAFATCSSHLTVVILFYGAAIYTYMLPSSYHTPEKDMMVSVFYTILTPVVNPLIYSLRNKDVMGALKKMLTVEPAFQKAME

SEQ ID NO: 52 - protein, 315 aa, Homo sapiens
MANITRMANHTGKLDFILMGLFRRSKHPALLSVVIFVVFLKALSGNAVLILLIHCDAHLHSPMYFFISQLSLMDMAYISVTVPKMLLDQVMGVNKVSAPECGMQMFLYLTLAGSEFFLLATMAYDRYVAICHPLRYPVLMNHRVCLFLASGCWFLGSVDGFMLTPITMSFPFCRSWEIHHFFCEVPAVTILSCSDTSLYETLMYLCCVLMLLIPVTIISSSYLLILLTVHRMNSAEGRKKAFATCSSHLTVVILFYGAAVYTYMLPSSYHTPEKDMMVSVFYTILTPVLNPLIYSLRNKDVMGALKKMLTVRFVL

SEQ ID NO: 53 - protein, 308 aa, Homo sapiens
MNENNETLTRGFTLMGLFTHNKCSGFFFGVICAVFFMAMIANGVMIFLINIDPHLHTPMYFLLSHLSVIDTLYISTIVPKMLVDYLMGEGTISFIACTAQCFLYMGFMGAEFFLLGLMAYDRYVAICNPLRYPVLISWRVCWMILASSWFGGALDSFLLTPITMSLPFCASHQINHFFCEAPTMLRLACGDKTTYETVMYVCCVAMLLIPFSVVTASYTRILITVHQMTSAEGRKKAFATCSSHMMVVTLFYGAALYTYTLPQSYHTPIKDKVFSAFYTILTPLLNPLIYSLRNRDVMGALKRVVARC

SEQ ID NO: 54 - protein, 308 aa, Homo sapiens
MPTLSFWVCSATPVSPGFFALILLVFVTSIASNVVKIILIHIDSRLHTPMYFLLSQLSLRDILYISTIVPKMLVDQVMSQRAISFAGCTAQHFLYLTLAGAEFFLLGLMSCDRYVAICNPLHYPDLMSRKICWLIVAAAWLGGSIDGFLLTPVTMQFPFCASREINHFFCEVPALLKLSCTDTSAYETAMYVCCIMMLLIPFSVISGSYTRILITVYRMSEAEGRRKAVATCSSHMVVVSLFYGAAMYTYVLPHSYHTPEQDKAVSAFYTILTPMLNPLIYSLRNKDVTGALQKVVGRCVSSGKVTTF

SEQ ID NO: 55 - protein, 312 aa, Homo sapiens
MENGSYTSYFILLGLFNHTRAHQVLFMMVLSIVLTSLFGNSLMILLIHWDHRLHTPMYFLLSQLSLMDVMLVSTTVPKMAADYLTGSKAISRAGCGAQIFFLPTLGGGECFLLAAMAYDRYAAVCHPLRYPTLMSWQLCLRMNLSCWLLGAADGLLQAVATLSFPYCGAHEIDHFFCETPVLVRLACADTSVFENAMYICCVLMLLVPFSLILSSYGLILAAVLHMRSTEARKKAFATCSSHVAVVGLFYGAAIFTYMRPKSHRSTNHDKVVSAFYTMFTPLLNPLIYSVKNSEVKGALTRCMGRCVALSRE

SEQ ID NO: 56 - protein, 320 aa, Homo sapiens
MEMRNTTPDFILLGLFNHTRAHQVLFMMLLATVLTSLFSNALMILLIHWDHRLHRPMYFLLSQLSLMDMMLVSTTVPKMAADYLTGNKAISRAGCGVQIFFLPTLGGGECFLLAAMAYDRYAAVCHPLRYPTLMSWQLCLRMTMSSWLLGAADGLLQAVATLSFPYCGAHEIDHFFCEAPVLVRLACADTSVFENAMYICCVLMLLVPFSLILSSYGLILAAVLLMRSTEARKKAFATCSSHVAVVGLFYGAGIFTYMRPKSHRSTNHDKVVSAFYTMFTPLLNPLIYSVRNSEVKEALKRWLGTCVNLKHQQNEAHRSR

SEQ ID NO: 57 - protein, 317 aa, Homo sapiens
MEQSNYSVYADFILLGLFSNARFPWLLFALILLVFLTSIASNVVKIILIHIDSRLHTPMYFLLSQLSLRDILYISTIVPKMLVDQVMSQRAISFAGCTAQHFLYLTLAGAEFFLLGLMSYDRYVAICNPLHYPVLMSRKICWLIVAAAWLGGSIDGFLLTPVTMQFPFCASREINHFFCEVPALLKLSCTDTSAYETAMYVCCIMMLLIPFSVISGSYTRILITVYRMSEAEGRGKAVATCSSHMVVVSLFYGAAMYTYVLPHSYHTPEQDKAVSAFYTILTPMLNPLIYSLRNKDVTGALQKVVGRCVSSGKVTTF

SEQ ID NO: 58 - protein, 315 aa, Homo sapiens
MANITRMANHTGRLDFILMGLFRQSKHPALLSVVIFVVFLKALSGNAVLILLIHCDAHLHSPMYFFISQLSLMDMAYISVTVPKMLLDQVMGVNKVSAPECGMQMFLYLTLAGSEFFLLATMAYDRYVAICHPLRYPVLMNHRVCLFLASGCWFLGSVDGFMLTPITMSFPFCRSWEIHHFFCEVPAVTILSCSDTSLYETLMYLCCVLMLLIPVTIISSSYLLILLTVHRMNSAEGRKKAFATCSSHLTVVILFYGAAVYTYMLPSSYHTPEKDMMVSVFYTILTPVLNPLIYSLRNKDVMGALKKMLTVRFVL

SEQ ID NO: 59 - protein, 320 aa, Artificial Sequence
  OR2T33
MEMRNTTPDFILLGLFNHTRAHQVLFMMVLSIVLTSLFGNSLMILLIHWDHRLHTPMYFLLSQLSLMDMMLVSTTVPKMAADYLTGSKAISRAGCGVQIFFLPTLGGGECFLLAAMAYDRYAAVCHPLRYPTLMSWQLCLRMTMSCWLLGAADGLLQAVVTLSFPYCGAHEIDHFFCETPVLVRLACADTSVFENAMYICCVLMLLVPFSLILSSYGLILAAVLHMRSTEARKKAFATCSSHVAVVGLFYGAAIFTYMRPKSHRSTNHDKVVSAFYTMFTPLLNPLIYSVKNSEVKGALKRWLGTCVNIKHQQNEAHRSR

SEQ ID NO: 60 - protein, 318 aa, Homo sapiens
MCSGNQTSQNQTASTDFTLTGLFAESKHAALLYTVTFLLFLMALTGNALLILLIHSEPRLHTPMYFFISQLALMDLMYLCVTVPKMLVGQVTGDDTISPSGCGIQMFFHLTLAGAEVFLLAAMAYDRYAAVCRPLHYPLLMNQRVCQLLVSACWVLGMVDGLLLTPITMSFPFCQSRKILSFFCETPALLKLSCSDVSLYKMLTYLCCILMLLTPIMVISSSYTLILHLIHRMNSAAGRRKALATCSSHMIIVLLLFGASFYTYMLRSSYHTAEQDMMVSAFYTIFTPVLNPLIYSLRNKDVTRALRSMMQSRMNQEK

SEQ ID NO: 61 - protein, 323 aa, Homo sapiens
MGMEGLLQNSTNFVLTGLITHPAFPGLLFAVVFSIFVVAITANLVMILLIHMDSRLHTPMYFLLSQLSIMDTIYICITVPKMLQDLLSKDKTISFLGCAVQIFYLTLIGGEFFLLGLMAYDRYVAVCNPLRYPLLMNRRVCLFMVVGSWVGGSLDGFMLTPVTMSFPFCRSREINHFFCEIPAVLKLSCTDTSLYETLMYACCVLMLLIPLSVISVSYTHILLTVHRMNSAEGRRKAFATCSSHIMVVSVFYGAAFYTNVLPHSYHTPEKDKVVSAFYTILTPMLNPLIYSLRNKDVAAALRKVLGRCGSSQSIRVATVIRKG

SEQ ID NO: 62 - protein, 335 aa, Homo sapiens
MNISDVISFDILVSAMKTGNQSFGTDFLLVGLFQYGWINSLLFVVIATLFTVALTGNIMLIHLIRLNTRLHTPMYFLLSQLSIVDLMYISTTVPKMAVSFLSQSKTIRFLGCEIQTYVFLALGGTEALLLGFMSYDRYVAICHPLHYPMLMSKKICCLMVACAWASGSINAFIHTLYVFQLPFCRSRLINHFFCEVPALLSLVCQDTSQYEYTVLLSGLIILLLPFLAILASYARVLIVVFQMSSGKGQAKAVSTCSSHLIVASLFYATTLFTYTRPHSLRSPSRDKAVAVFYTIVTPLLNPFIYSLRNKEVTGAVRRLLGYWICCRKYDFRSLY

SEQ ID NO: 63 - protein, 311 aa, Homo sapiens
MEMENCTRVKEFIFLGLTQNREVSLVLFLFLLLVYVTTLLGNLLIMVTVTCESRLHTPMYFLLHNLSIADICFSSITVPKVLVDLLSERKTISFNHCFTQMFLFHLIGGVDVFSLSVMALDRYVAISKPLHYATIMSRDHCIGLTVAAWLGGFVHSIVQISLLLPLPFCGPNVLDTFYCDVHRVLKLAHTDIFILELLMISNNGLLTTLWFFLLLVSYIVILSLPKSQAGEGRRKAISTCTSHITVVTLHFVPCIYVYARPFTALPMDKAISVTFTVISPLLNPLIYTLRNHEMKSAMRRLKRRLVPSDRK

SEQ ID NO: 64 - protein, 313 aa, Homo sapiens
MDSLNQTRVTEFVFLGLTDNRVLEMLFFMAFSAIYMLTLSGNILIIIATVFTPSLHTPMYFFLSNLSFIDICHSSVTVPKMLEGLLLERKTISFDNCITQLFFLHLFACAEIFLLIIMAYDRYVAICTPLHYPNVMNMRVCIQLVFALWLGGTVHSLGQTFLTIRLPYCGPNIIDSYFCDVPLVIKLACTDTYLTGILIVTNSGTISLSCFLAVVTSYMVILVSLRKHSAEGRRKALSTCSAHFMVVALFFGPCIFIYTRPDTSFSIDKVVSVFYTVVTPLLNPFIYTLRNEEVKSAMKQLRQRQVFFTKSYT

SEQ ID NO: 65 - protein, 326 aa, Homo sapiens
MKKVTAEAISWNESTSETNNSMVTEFIFLGLSDSQELQTFLFMLFFVFYGGIVFGNLLIVITVVSDSHLHSPMYFLLANLSLIDLSLSSVTAPKMITDFFSQRKVISFKGCLVQIFLLHFFGGSEMVILIAMGFDRYIAICKPLHYTTIMCGNACVGIMAVTWGIGFLHSVSQLAFAVHLLFCGPNEVDSFYCDLPRVIKLACTDTYRLDIMVIANSGVLTVCSFVLLIISYTIILMTIQHRPLDKSSKALSTLTAHITVVLLFFGPCVFIYAWPFPIKSLDKFLAVFYSVITPLLNPIIYTLRNKDMKTAIRQLRKWDAHSSVKF

SEQ ID NO: 66 - protein, 311 aa, Homo sapiens
MAHTNESMVSEFVLLGLSNSWGLQLFFFAIFSIVYVTSVLGNVLIIVIISFDSHLNSPMYFLLSNLSFIDICQSNFATPKMLVDFFIERKTISFEGCMAQIFVLHSFVGSEMMLLVAMAYDRFIAICKPLHYSTIMNRRLCVIFVSISWAVGVLHSVSHLAFTVDLPFCGPNEVDSFFCDLPLVIELACMDTYEMEIMTLTNSGLISLSCFLALIISYTIILIGVRCRSSSGSSKALSTLTAHITVVILFFGPCIYFYIWPFSRLPVDKFLSVFYTVCTPLLNPIIYSLRNEDVKAAMWKLRNRHVNSWKN

SEQ ID NO: 67 - protein, 314 aa, Homo sapiens
MDVGNKSTMSEFVLLGLSNSWELQMFFFMVFSLLYVATMVGNSLIVITVIVDPHLHSPMYFLLTNLSIIDMSLASFATPKMITDYLTGHKTISFDGCLTQIFFLHLFTGTEIILLMAMSFDRYIAICKPLHYASVISPQVCVALVVASWIMGVMHSMSQVIFALTLPFCGPYEVDSFFCDLPVVFQLACVDTYVLGLFMISTSGIIALSCFIVLFNSYVIVLVTVKHHSSRGSSKALSTCTAHFIVVFLFFGPCIFIYMWPLSSFLTDKILSVFYTIFTPTLNPIIYTLRNQEVKIAMRKLKNRFLNFNKAMPS

SEQ ID NO: 68 - protein, 323 aa, Homo sapiens
MDKSNSSVVSEFVLLGLCSSQKLQLFYFCFFSVLYTVIVLGNLLIILTVTSDTSLHSPMYFLLGNLSFVDICQASFATPKMIADFLSAHETISFSGCIAQIFFIHLFTGGEMVLLVSMAYDRYVAICKPLYYVVIMSRRTCTVLVMISWAVSLVHTLSQLSFTVNLPFCGPNVVDSFFCDLPRVTKLACLDSYIIEILIVVNSGILSLSTFSLLVSSYIIILVTVWLKSSAAMAKAFSTLASHIAVVILFFGPCIFIYVWPFTISPLDKFLAIFYTVFTPVLNPIIYTLRNRDMKAAVRKIVNHYLRPRRISEMSLVVRTSFH

SEQ ID NO: 69 - protein, 312 aa, Homo sapiens
MKLLNQSQVSEFILLGLTSSQDVEFLLFALFSVIYVVTVLGNLLIIVTVFNTPNLNTPMYFLLGNLSFVDMTLASFATPKVILNLLKKQKVISFAGCFTQIFLLHLLGGVEMVLLVSMAFDRYVAICKPLHYMTIMNKKVCVLLVVTSWLLGLLHSGFQIPFAVNLPFCGPNVVDSIFCDLPLVTKLACIDIYFVQVVIVANSGIISLSCFIILLISYSLILITIKNHSPTGQSKARSTLTAHITVVILFFGPCIFIYIWPFGNHSVDKFLAVFYTIITPILNPIIYTLRNKEMKISMKKLWRAFVNSREDT

SEQ ID NO: 70 - protein, 312 aa, Homo sapiens
MDLKNGSLVTEFILLGFFGRWELQIFFFVTFSLIYGATVMGNILIMVTVTCRSTLHSPLYFLLGNLSFLDMCLSTATTPKMIIDLLTDHKTISVWGCVTQMFFMHFFGGAEMTLLIIMAFDRYVAICKPLHYRTIMSHKLLKGFAILSWIIGFLHSISQIVLTMNLPFCGHNVINNIFCDLPLVIKLACIETYTLELFVIADSGLLSFTCFILLLVSYIVILVSVPKKSSHGLSKALSTLSAHIIVVTLFFGPCIFIYVWPFSSLASNKTLAVFYTVITPLLNPSIYTLRNKKMQEAIRKLRFQYVSSAQNF

SEQ ID NO: 71 - protein, 313 aa, Homo sapiens
METANYTKVTEFVLTGLSQTREVQLVLFVIFLSFYLFILPGNILIICTIRLDPHLTSPMYFLLANLALLDIWYSSITAPKMLIDFFVERKIISFGGCIAQLFFLHFVGASEMFLLTVMAYDRYAAICRPLHYATIMNRRLCCILVALSWMGGFIHSIIQVALIVRLPFCGPNELDSYFCDITQVVRIACANTFPEELVMICSSGLISVVCFIALLMSYAFLLALLKKHSGSGENTNRAMSTCYSHITIVVLMFGPSIYIYARPFDSFSLDKVVSVFHTVIFPLLNPIIYTLRNKEVKAAMRKVVTKYILCEEK

SEQ ID NO: 72 - protein, 307 aa, Homo sapiens
MESENRTVIREFILLGLTQSQDIQLLVFVLVLIFYFIILPGNFLIIFTIKSDPGLTAPLYFFLGNLAFLDASYSFIVAPRMLVDFLSAKKIISYRGCITQLFFLHFLGGGEGLLLVVMAFDRYIAICRPLHYPTVMNPRTCYAMMLALWLGGFVHSIIQVVLILRLPFCGPNQLDNFFCDVPQVIKLACTDTFVVELLMVFNSGLMTLLCFLGLLASYAVILCRIRGSSSEAKNKAMSTCITHIIVIFFMFGPGIFIYTRPFRAFPADKVVSLFHTVIFPLLNPVIYTLRNQEVKASMKKVFNKHIA

SEQ ID NO: 73 - protein, 308 aa, Homo sapiens
METQNLTVVTEFILLGLTQSQDAQLLVFVLVLIFYLIILPGNFLIIFTIKSDPGLTAPLYFFLGNLALLDASYSFIVVPRMLVDFLSEKKVISYRSCITQLFFLHFLGAGEMFLLVVMAFDRYIAICRPLHYSTIMNPRACYALSLVLWLGGFIHSIVQVALILHLPFCGPNQLDNFFCDVPQVIKLACTNTFVVELLMVSNSGLLSLLCFLGLLASYAVILCRIREHSSEGKSKAISTCTTHIIIIFLMFGPAIFIYTCPFQAFPADKVVSLFHTVIFPLMNPVIYTLRNQEVKASMRKLLSQHMFC

SEQ ID NO: 74 - protein, 315 aa, Homo sapiens
MSITKAWNSSSVTMFILLGFTDHPELQALLFVTFLGIYLTTLAWNLALIFLIRGDTHLHTPMYFFLSNLSFIDICYSSAVAPNMLTDFFWEQKTISFVGCAAQFFFFVGMGLSECLLLTAMAYDRYAAISSPLLYPTIMTQGLCTRMVVGAYVGGFLSSLIQASSIFRLHFCGPNIINHFFCDLPPVLALSCSDTFLSQVVNFLVVVTVGGTSFLQLLISYGYIVSAVLKIPSAEGRWKACNTCASHLMVVTLLFGTALFVYLRPSSSYLLGRDKVVSVFYSLVIPMLNPLIYSLRNKEIKDALWKVLERKKVFS

SEQ ID NO: 75 - protein, 308 aa, Homo sapiens
MDTGNKTLPQDFLLLGFPGSQTLQLSLFMLFLVMYILTVSGNVAILMLVSTSHQLHTPMYFFLSNLSFLEIWYTTAAVPKALAILLGRSQTISFTSCLLQMYFVFSLGCTEYFLLAAMAYDRCLAICYPLHYGAIMSSLLSAQLALGSWVCGFVAIAVPTALISGLSFCGPRAINHFFCDIAPWIALACTNTQAVELVAFVIAVVVILSSCLITFVSYVYIISTILRIPSASGRSKAFSTCSSHLTVVLIWYGSTVFLHVRTSIKDALDLIKAVHVLNTVVTPVLNPFIYTLRNKEVRETLLKKWKGK

SEQ ID NO: 76 - protein, 347 aa, Homo sapiens
MGNWTAAVTEFVLLGFSLSREVELLLLVLLLPTFLLTLLGNLLIISTVLSCSRLHTPMYFFLCNLSILDILFTSVISPKVLANLGSRDKTISFAGCITQCYFYFFLGTVEFLLLTVMSYDRYATICCPLRYTTIMRPSVCIGTVVFSWVGGFLSVLFPTILISQLPFCGSNIINHFFCDSGPLLALACADTTAIELMDFMLSSMVILCCIVLVAYSYTYIILTIVRIPSASGRKKAFNTCASHLTIVIISSGITVFIYVTPSQKEYLEINKIPLVLSSVVTPFLNPFIYTLRNDTVQGVLRDVWVRVRGVFEKRMRAVLRSRLSSNKDHQGRACSSPPCVYSVKLQC

SEQ ID NO: 77 - protein, 309 aa, Homo sapiens
MKSWNNTIILEFLLLGISEEPELQAFLFGLFLSMYLVTVLGNLLIILATISDSHLHTPMYFFLSNLSFVDICFVSTTVPKMLVNIQTHNKVITYAGCITQMCFFLLFVGLDNFLLTVMAYDRFVAICHPLHYMVIMNPQLCGLLVLASWIMSVLNSMLQSLMVLPLPFCTHMEIPHFFCEINQVVHLACSDTFLNDIVMYFAVALLGGGPLTGILYSYSKIVSSIRAISSAQGKYKAFSTCASHLSVVSLFYGTCLGVYLSSAATHNSHTGAAASVMYTVVTPMLNPFIYSLRNKHIKGAMKTFFRGKQ

SEQ ID NO: 78 - protein, 319 aa, Homo sapiens
MERGNQTEVGNFLLLGFAEDSDMQLLLHGLFLSMYLVTIIGNLLIILTISSDSHLHTPMYFFLSNLSFADICFTSTTVPKMLVNIQTQSKMITFAGCLTQIFFFIAFGCLDNLLLTMTAYDRFVAICYPLHYTVIMNPRLCGLLVLGSWCISVMGSLLETLTILRLSFCTNMEIPHFFCDPSEVLKLACSDTFINNIVMYFVTIVLGVFPLCGILFSYSQIFSSVLRVSARGQHKAFSTCGSHLSVVSLFYGTGLGVYLSSAVTPPSRTSLAASVMYTMVTPMLNPFIYSLRNKDMKGSLGRLLLRATSLKEGTIAKLS

SEQ ID NO: 79 - protein, 324 aa, Homo sapiens
MEARNQTAISKFLLLGLIEDPELQPVLFSLFLSMYLVTILGNLLILLAVISDSHLHTPMYFFLSNLSFLDICLSTTTIPKMLVNIQAQNRSITYSGCLTQICFVLFFAGLENCLLAAMAYDRYVAICHPLRYTVIMNPRLCGLLILLSLLTSVVNALLLSLMVLRLSFCTDLEIPLFFCELAQVIQLTCSDTLINNILIYFAACIFGGVPLSGIILSYTQITSCVLRMPSASGKHKAVSTCGSHLSIVLLFYGAGLGVYISSVVTDSPRKTAVASVMYSVFPQMVNPFIYSLRNKDMKGTLRKFIGRIPSLLWCAICFGFRFLE

SEQ ID NO: 80 - protein, 312 aa, Homo sapiens
MKAGNFSDTPEFFLLGLSGDPELQPILFMLFLSMYLATMLGNLLIILAVNSDSHLHTPMYFLLSILSLVDICFTSTTMPKMLVNIQAQAQSINYTGCLTQICFVLVFVGLENGILVMMAYDRFVAICHPLRYNVIMNPKLCGLLLLLSFIVSVLDALLHTLMVLQLTFCIDLEIPHFFCELAHILKLACSDVLINNILVYLVTSLLGVVPLSGIIFSYTRIVSSVMKIPSAGGKYKAFSICGSHLIVVSLFYGTGFGVYLSSGATHSSRKGAIASVMYTVVTPMLNPLIYSLRNKDMLKALRKLISRIPSFH

SEQ ID NO: 81 - protein, 310 aa, Homo sapiens
MGKTKNTSLDAVVTDFILLGLSHPPNLRSLLFLVFFIIYILTQLGNLLILLTMWADPKLCARPMYILLGVLSFLDMWLSSVTVPLLILDFTPSIKAIPFGGCVAQLYFFHFLGSTQCFLYTLMAYDRYLAICQPLRYPVLMNGRLCTVLVAGAWVAGSMHGSIQATLTFRLPYCGPNQVDYFICDIPAVLRLACADTTVNELVTFVDVGVVAASCFMLILLSYANIVNAILKIRTTDGRRRAFSTCGSHLIVVTVYYVPCIFIYLRAGSKDPLDGAAAVFYTVVTPLLNPLIYTLRNQEVKSALKRITAG

SEQ ID NO: 82 - protein, 309 aa, Homo sapiens
MKRENFTLITDFVFQGFSSFHEQQITLFGVFLALYILTLAGNIIIVTIIRMDLHLHTPMYFFLSMLSTSETVYTLVILPRMLSSLVGMSQPISLAGCATQMFFFVTFGITNCFLLTAMGYDRYVAICNPLRYMVIMNKRLRIQLVLGACSIGLIVAITQVTSVFRLPFCARKVPHFFCDIRPVMKLSCIDTTVNEILTLIISVLVLVVPMGLVFISYVLIISTILKIASVEGRKKAFATCASHLTVVIVHYSCASIAYLKPKSENTREHDQLISVTYTVITPLLNPVVYTLRNKEVKDALCRAVGGKFS

SEQ ID NO: 83 - protein, 329 aa, Homo sapiens
MPKLNSTFVTEFLFEGFSSFRRQHKLVFFVVFLTLYLLTLSGNVIIMTIIRLDHHLHTPMYFFLCMLSISETCYTVAIIPHMLSGLLNPHQPIATQSCATQLFFYLTFGINNCFLLTVMGYDRYVAICNPLRYSVIMGKRACIQLASGSLGIGLGMAIVQVTSVFGLPFCDAFVISHFFCDVRHLLKLACTDTTVNEIINFVVSVCVLVLPMGLVFISYVLIISTILKIASAEGQKKAFATCASHLTVVIIHYGCASIIYLKPKSQSSLGQDRLISVTYTHHSPTEPCCVQPEEQGGQRCSAQSRGAKNSVSLMKRGCEGFSFAFINMY

SEQ ID NO: 84 - protein, 313 aa, Homo sapiens
MEQVNKTVVREFVVLGFSSLARLQQLLFVIFLLLYLFTLGTNAIIISTIVLDRALHTPMYFFLAILSCSEICYTFVIVPKMLVDLLSQKKTISFLGCAIQMFSFLFFGSSHSFLLAAMGYDRYMAICNPLRYSVLMGHGVCMGLMAAACACGFTVSLVTTSLVFHLPFHSSNQLHHFFCDISPVLKLASQHSGFSQLVIFMLGVFALVIPLLLILVSYIRIISAILKIPSSVGRYKTFSTCASHLIVVTVHYSCASFIYLRPKTNYTSSQDTLISVSYTILTPLFNPMIYSLRNKEFKSALRRTIGQTFYPLS

SEQ ID NO: 85 - protein, 312 aa, Homo sapiens
MERVNETVVREVIFLGFSSLARLQQLLFVIFLLLYLFTLGTNAIIISTIVLDRALHIPMYFFLAILSCSEICYTFIIVPKMLVDLLSQKKTISFLGCAIQMFSFLFLGCSHSFLLAVMGYDRYIAICNPLRYSVLMGHGVCMGLVAAACACGFTVAQIITSLVFHLPFYSSNQLHHFFCDIAPVLKLASHHNHFSQIVIFMLCTLVLAIPLLLILVSYVHILSAILQFPSTLGRCKAFSTCVSHLIIVTVHYGCASFIYLRPQSNYSSSQDALISVSYTIITPLFNPMIYSLRNKEFKSALCKIVRRTISLL

SEQ ID NO: 86 - protein, 314 aa, Homo sapiens
MRGFNKTTVVTQFILVGFSSLGELQLLLFVIFLLLYLTILVANVTIMAVIRFSWTLHTPMYGFLFILSFSESCYTFVIIPQLLVHLLSDTKTISFMACATQLFFFLGFACTNCLLIAVMGYDRYVAICHPLRYTLIINKRLGLELISLSGATGFFIALVATNLICDMRFCGPNRVNHYFCDMAPVIKLACTDTHVKELALFSLSILVIMVPFLLILISYGFIVNTILKIPSAEGKKAFVTCASHLTVVFVHYGCASIIYLRPKSKSASDKDQLVAVTYTVVTPLLNPLVYSLRNKEVKTALKRVLGMPVATKMS

SEQ ID NO: 87 - protein, 326 aa, Homo sapiens
MVLNVYCCFFQISDIQTMKINQTILKEFILVGFSVYPHVQTFLFVVFFCLYLLTLAGNLIIMGLTWVDRSLHTPMYLFLSALSFSETCYTLTIVPKMLEDLLAKDRSISVTGCSLQMCFFLGLGGTNCIILTLMGYDRFLAICNPLRYPLLMTNIVCGQLVASACTAGFFISLTETALIFRDSFCRPNLVKHFFCHMLAVIRLSCIDSNHTEFIITLISVSGLLGTLLLIILTDVFIISTVLRIPSAEGKQKAFTTCASHLTVVIIHFGFASIVYLKPEASGDDTLIAVPYTVITPFLSPIIFSLRNKDMKNAFRRMMGNTVALKK

SEQ ID NO: 88 - protein, 311 aa, Homo sapiens
MKIFNSPSNSSTFTGFILLGFPCPREGQILLFVLFTVVYLLTLMGNGSIICAVHWDQRLHAPMYILLANFSFLEICYVTSTVPSMLANFLSDTKIISFSGCFLQFYFFFSLGSTECFFLAVMAFDRYLAICRPLRYPTIMTRRLCTNLVVNCWVLGFIWFLIPIVNISQMSFCGSRIIDHFLCDPAPLLTLTCKKGPVIELVFSVLSPLPVFMLFLFIVGSYALVVRAVLRVPSAAGRRKAFSTCGSHLAVVSLFYGSVLVMYGSPPSKNEAGKQKTVTLFYSVVTPLLNPVIYSLRNKDMRKALKKFWGT

SEQ ID NO: 89 - protein, 330 aa, Homo sapiens
MFFIIHSLVTSVFLTALGPQNRTMHFVTEFVLLGFHGQREMQSCFFSFILVLYLLTLLGNGAIVCAVKLDRRLHTPMYILLGNFAFLEIWYISSTVPNMLVNILSEIKTISFSGCFLQFYFFFSLGTTECFFLSVMAYDRYLAICRPLHYPSIMTGKFCIILVCVCWVGGFLCYPVPIVLISQLPFCGPNIIDHLVCDPGPLFALACISAPSTELICYTFNSMIIFGPFLSILGSYTLVIRAVLCIPSGAGRTKAFSTCGSHLMVVSLFYGTLMVMYVSPTSGNPAGMQKIITLVYTAMTPFLNPLIYSLRNKDMKDALKRVLGLTVSQN

SEQ ID NO: 90 - protein, 314 aa, Homo sapiens
MNNSQISTVTQFVLLGFPGPWKIQIIFFSMILLVYIFTLTGNMAIICAVRWDHRLHTPMYVLLANFSFLEIWYVTCTVPNMLVNFFSKTKTISFSGCFTQFHFFFSLGTTECFFLCVMAYDRYLAICHPLHYPSIMTGQLCGILVSLCWLIGFLGHSISIFFIFQLPFCGPNIIDHFLCDVDPLMALSSAPTHIIGHVFHSVSSLFINLTMVYILGSYTLVLRTVLQVPSSAGWQKAISTCGSHLVVVSLFYGAIMLMYVSPTPGNSVAMHKLITLIYSVVTPVLNPLIYSLRNKDMKYALHHVFCGMRIIQRS

SEQ ID NO: 91 - protein, 322 aa, Homo sapiens
MEPQNTSTVTNFQLLGFQNLLEWQALLFVIFLLIYCLTIIGNVVIITVVSQGLRLHSPMYMFLQHLSFLEVWYTSTTVPLLLANLLSWGQAISFSACMAQLYFFVFLGATECFLLAFMAYDRYLAICSPLRYPFLMHRGLCARLVVVSWCTGVSTGFLPSLMISRLDFCGRNQINHFFCDLPPLMQLSCSRVYITEVTIFILSIAVLCICFFLTLGPYVFIVSSILRIPSTSGRRKTFSTCGSHLAVVTLYYGTMISMYVCPSPHLLPEINKIISVFYTVVTPLLNPVIYSLRNKDFKEAVRKVMRRKCGILWSTSKRKFLY

SEQ ID NO: 92 - protein, 314 aa, Homo sapiens
MANVTLVTGFLLMGFSNIQKLRILYGVLFLLIYLAALMSNLLIITLITLDVKLQTPMYFFLKNLSFLDVFLVSVPIPKFIVNNLTHNNSISILGCAFQLLLMTSFSAGEIFILTAMSYDRYVAICCPLNYEVIMNTGVCVLMASVSWAIGGLFGTAYTAGTFSMPFCGSSVIPQFFCDVPSLLRISCSETLMVIYAGIGVGACLSISCFICIVISYIYIFSTVLKIPTTKGQSKAFSTCFPHLTVFTVFIITAYFVYLKPPSNSPSVIDRLLSVIYTVMPPVFNPVTYSLRNNDMKCALIRLLQKTYGQEAYFI

SEQ ID NO: 93 - protein, 309 aa, Homo sapiens
MANLTIVTEFILMGFSTNKNMCILHSILFLLIYLCALMGNVLIIMITTLDHHLHTPVYFFLKNLSFLDLCLISVTAPKSIANSLIHNNSISFLGCVSQVFLLLSSASAELLLLTVMSFDRYTAICHPLHYDVIMDRSTCVQRATVSWLYGGLIAVMHTAGTFSLSYCGSNMVHQFFCDIPQLLAISCSENLIREIALILINVVLDFCCFIVIIITYVHVFSTVKKIPSTEGQSKAYSICLPHLLVVLFLSTGFIAYLKPASESPSILDAVISVFYTMLPPTFNPIIYSLRNKAIKVALGMLIKGKLTKK

SEQ ID NO: 94 - protein, 312 aa, Homo sapiens
MPNSTTVMEFLLMRFSDVWTLQILHSASFFMLYLVTLMGNILIVTVTTCDSSLHMPMYFFLRNLSILDACYISVTVPTSCVNSLLDSTTISKAGCVAQVFLVVFFVYVELLFLTIMAHDRYVAVCQPLHYPVIVNSRICIQMTLASLLSGLVYAGMHTGSTFQLPFCRSNVIHQFFCDIPSLLKLSCSDTFSNEVMIVVSALGVGGGCFIFIIRSYIHIFSTVLGFPRGADRTKAFSTCIPHILVVSVFLSSCSSVYLRPPAIPAATQDLILSGFYSIMPPLFNPIIYSLRNKQIKVAIKKIMKRIFYSENV

SEQ ID NO: 95 - protein, 314 aa, Homo sapiens
MTNQTQMMEFLLVRFTENWVLLRLHALLFSLIYLTAVLMNLVIILLMILDHRLHMAMYFFLRHLSFLDLCLISATVPKSILNSVASTDSISFLGCVLQLFLVVLLAGSEIGILTAMSYDRYAAICCPLHCEAVMSRGLCVQLMALSWLNRGALGLLYTAGTFSLNFYGSDELHQFFCDVPALLKLTCSKEHAIISVSVAIGVCYAFSCLVCIVVSYVYIFSAVLRISQRQRQSKAFSNCVPHLIVVTVFLVTGAVAYLKPGSDAPSILDLLVSVFYSVAPPTLNPVIYCLKNKDIKSALSKVLWNVRSSGVMKR

SEQ ID NO: 96 - protein, 335 aa, Homo sapiens
MAQQRGSAAQCPSYTEPQNLTGVSEFLLLGLSEDPELQPVLAGLFLSMYLVTVLGNLLIILAVSSDSHLHTPMYFFLSNLSLADIGFTSTTVPKMIVDMQTHSRVISYEGCLTQMSFFVLFACMDDMLLSVMAYDRFVAICHPLHYRIIMNPRLCGFLILLSFFISLLDSQLHNLIMLQLTCFKDVDISNFFCDPSQLLHLRCSDTFINEMVIYFMGAIFGCLPISGILFSYYKIVSPILRVPTSDGKYKAFSTCGSHLAVVCLFYGTGLVGYLSSAVLPSPRKSMVASVMYTVVTPMLNPFIYSLRNKDIQSALCRLHGRIIKSHHLHPFCYMG

SEQ ID NO: 97 - protein, 310 aa, Artificial Sequence
  OR2A25 consensus-a
MGGNQTSITEFLLLGFPVGPRIQMLLFGLFSLFYIFTLLGNGTILGLISLDSRLHTPMYFFLSHLAVVDIAYACNTVPQMLVNLLHPAKPISFAGCMTQMFLFLSFAHTECLLLVVMSYDRYVAICHPLRYSTIMTWRVCITLALTSWILGVLLALVHLVLLLPLSFCGPQKVNHFFCEIMAVLKLACADTHINEVMVLAGAVSVLVGPFFSIVISYVHILCAILKIQSGEGRQKAFSICSSHLCVVGLFYGTAIIMYVEPQYESPKEQKKYLLLFHSLFNPMLNPLIYSLRNKEVQGTLKRMLEKERTS

SEQ ID NO: 98 - protein, 310 aa, Artificial Sequence
  OR2A25 consensus-b
MGGNQTSITEFLLLGFPVGPRIQMLLFGLFSLFYVFTLLGNGTILGLISLDSRLHTPMYFFLSHLAVVDIAYACNTVPQMLVNLLHPAKPISFAGCMTQTFLFLSFAHTECLLLVVMSYDRYVAICHPLRYSAIMTWRVCITLALTSWTLGVLLALIHLVLLLPLPFCRPQKINHFFCEIMAVLKLACADTHINEVMVLAGAISVLVGPLSSIVVSYMCILCAILKIQSGEGQRKAFSTCSSHLCVVGLFYGTAIIMYVGPQYGNPKEQKKYLLLFHSLFNPMLNPLIYSLRNSEVKNTLKRMLEKERAL

SEQ ID NO: 99 - protein, 310 aa, Artificial Sequence
  OR2A25 consensus-c
MGGNQTSVTEFILLGFPLGPRIQMLLFGLFSLFYIFTLLGNGTILGLISLDSRLHTPMYFFLSHLAIVDIAYACNTVPQMLVNLLHPAKPISFAGCMTQTFLFLSFAHTECLLLVVMSYDRYVAICHPLRYSTIMSWRVCITLALTSWILGVLLALVHLVLLLPLPFCGPQKVNHFFCEIIAVLKLACADTHINEVMVLAGAVSVLVGPFSSIVISYIHILCAILKIQSGEGRQKAFSTCSSHLCVVGLFYGTAIIMYVGPQYGSPKEQKKYLLLFHSLFNPMLNPLIYSLRNKEVKAALKRMLEKERTS

SEQ ID NO: 100 - protein, 316 aa, Artificial Sequence
  OR2AG1 consensus-c
MELWNSTLGSGFILVGILNDSGSPELLCATITVLYMLALTSNGLLLLVITMDARLHVPMYLLLGQLSLMDLLFTSVVTPKALADFLRRENTISFGGCALQMFLALTLGGAEDLLLAFMAYDRYVAICHPLNYMVLMRPRVCWLMVATSWILASLSALIYTVYTMHYPFCKARKIRHLLCEIPPLLKLACADTSRYELMVYVMGVTFLIPPLAAILASYTLILFTVLHMPSNEGRKKALVTCSSHLTVVGMFYGAATFMYVLPSSFHSPKQDNIISVFYTIVTPALNPLIYSLRNKEVMGALRRVLGKYMLPAHSTL

SEQ ID NO: 101 - protein, 316 aa, Artificial Sequence
  OR2AG2 consensus-c
MELWNSTLGSGFILVGILNDSGSPELLCATITVLYMLALTSNGLLLLVITIDARLHVPMYLLLGQLSLMDLLFTSVVTPKALADFLRRENTISFGGCALQMFLALTLGGAEDLLLAFMAYDRYVAICHPLNYMVLMRPRVCWLMVATSWILASLIALGHTMYTMHFPFCMSWEIRHLLCEIPPLLKLACADTSRYELMVYVTGVTFLLLPLSAIVASYTLILFTVLHMPSNEGRKKALVTCSSHLTVVGMFYGAATFMYVLPSSFHSPKQDNIISVFYTIVTPALNPLIYSLRNKEVMGALRRVLGKYILLAHSTL

SEQ ID NO: 102 - protein, 311 aa, Artificial Sequence
  OR2D2 consensus-c
MRQTNQTQVTEFLLLGLSDDPHTQQLLFILFLGVYLVTVLGNLLLMSLVHVDSQLHTPMYFFLCNLSLADLCFSTNIVPQALVHLLSRKKVISFTRCAAQLLLFLIFGCTQCALLAVMSYDRYVAICNPLHYPSIMTWRVCVQLATGSWTSGILVSVVDTTFTLRLPYRGSNSIAHFFCEAPALLILASTDTHTSEMAIFLMGVVILLIPVSLILVSYGRIIVTVVRMKSAVGRLKAFSTCGSHLMVVILFYGSAIITYMTPKSSKEQEKLVSVFYAMVTPMLNPLIYSLRNKDVKGALRKVATRNFPCRL

SEQ ID NO: 103 - protein, 305 aa, Artificial Sequence
  OR2D3 consensus-c
MGEENQTSEFIFLGLSQDPQTQILLFFLFLIIYLLTVLGNLLIIVLIHSDSRLHTPMYFFLRNLSFADLCFSTSIVPQVLVHFLVKRKTISFAGCSTQIVVFLLVGCTECALLAVMSYDRYVAVCKPLHYSTIMTQWVCVQLAIGSWASGALVSLVDTTFTFRLPYRGQNIINHYFCEPPALLKLASADTYSTEMAIFAMGVVILLAPVSLILVSYWNIISTVIQMQSGEGRLKAFSTCGSHLIVVVLFYGSGIFAYMRPNSKTMNERDKMISVFYSVVTPMLNPIIYSLRNKDVKGALRKLTLR

SEQ ID NO: 104 - protein, 317 aa, Artificial Sequence
  OR2T11 consensus-a
MTNTTSSSDFILLGLLVNSEATGIVFTVILAVFVVAVTANLVMIFLIQVDSRLHTPMYFLLSQLSIMDTLFICTTVPKLLVDMVSKEKTISFVACGIQIFLYLTMIGSEFFLLGLMAYDRYVAVCNPLRYPVLMNRKKCLLLAAGAWFGGSLDGFLLTPITMNVPYCGSRSINHFFCEIPAVLKLACADTSLYETLMYICCVLMLLIPISIISTSYSLILLTVHRMRSAEGRKKAFTTCSSHLTVVSIFYGAAFYTYVLPQSFHTPEQDKVVSAFYTIVTPMLNPLIYSLRNKDVIGAFKKVFACCSSAQKVATSDA

SEQ ID NO: 105 - protein, 318 aa, Artificial Sequence
  OR2T11 consensus-b
MENLLQNSTDFVLLGLITHPAFPGLVFAIVFSIFVVAITANVVMILLIHVDSRLHTPMYFLLSQLSIMDTIYICITVPKMLQDLLSKDKTISFLGCAIQIFLYLTLIGGEFFLLGLMAYDRYVAVCNPLRYPLLMNRRKCLFMVAGSWVGGSLDGFMLTPVTMSFPYCGSREINHFFCEIPAVLKLSCADTSLYETLMYACCVLMLLIPLSVISVSYTLILLTVHRMPSAEGRRKAFATCSSHLTVVSIFYGAAFYTNVLPHSYHTPEKDKVVSAFYTILTPMLNPLIYSLRNKDVAAALRKVLGRCGSSQKIRTSDA

SEQ ID NO: 106 - protein, 316 aa, Artificial Sequence
  OR2T11 consensus-c
MKNTSSSDFILLGLLVNSEATGIVFTVIFAIFVVAVTANLVMIFLIQVDSRLHTPMYFLLSQLSIMDTLFICTTVPKLLVDMVSKEKTISFVACGIQIFLYLTMIGSEFFLLGLMAYDRYVAVCNPLRYPVLMNRKVCLLLAAGAWFGGSLDGFLLTPITMNVPYCGSRSINHFFCEIPAVLKLACADTSLYETLMYICCVLMLLIPISIISTSYSLILLTVHRMRSAEGRKKAFTTCSSHLTVVSIFYGAAFYTYVLPQSFHTPEQDKVVSAFYTIVTPMLNPLIYSLRNKDVMGAFKKVFACCSSAQKVATSDA

SEQ ID NO: 107 - protein, 320 aa, Artificial Sequence
  OR2W1 consensus-a
MDQRNYSSLHGFILLGFSDHPKMEMILSGVVAIFYLITLVGNTAIILASLLDSQLHTPMYFFLRNLSFLDLCFTTSIIPQMLVNLWGPDKTISYVGCIIQLYVYMWLGSIECLLLAVMSYDRFTAICKPLHYFVIMNPHLCLKMIIMVWSISLANSVVLCTLTLNLPTCGNNLLDHFLCELPALVKIACVDTTTVEMSVFALGIIIVLTPLILILISYGYIAKAVLRMKSKAGQRKAMNTCGSHLTVVSIFYGTIIYMYLQPGNSASKDQGKFLTLFYTIITPSLNPLIYTLRNKDMKDALKKLMRFHHKSTKIKRNCKS

SEQ ID NO: 108 - protein, 320 aa, Artificial Sequence
  OR2W1 consensus-b
MDQSNYSSLHGFILVGFSDRPKLEMILFGVVAIFYLITLVGNTTIILASLLDSQLHTPMYFFLRNLSFLDLCFTTSIIPQMLVNLWGPDKTISYVGCAIQLYVYLWLGGVECLLLAVMAYDRYTAVCKPLHYFVIMHPHLCLKLIIMAWSSGLANSVVMCPLTLNLPRCGNNIVDHFLCEMPALIKMACVDTTTVEMLVFALAIIIVLTPLILILISYGYIAKAVLRIKSAAGQRKAFNTCSSHLTVVSLFYGTIIYMYLQPGNRASQDQGKFLTLFYTIVTPSLNPLIYTLRNKDVKDALKKLLGFHHKSTKIKRNCKS

SEQ ID NO: 109 - protein, 320 aa, Artificial Sequence
  OR2W1 consensus-c
MDQSNYSSLHGFILLGFSDHPKLEMILSGVVTIFYLITLVGNTAIILASLLDSHLHTPMYFFLRNLSFLDLCFTTSIIPQMLVNLWGPDKTISYVGCVIQLYVYMWLGSIECLLLAVMSYDRFTAICKPLHYLVIMNPHLCLKMIIMVWSISLANSVVLCTLTLNLPRCGNNLLDHFLCELPAMVKIACVDTTTVEMSVFALGIVIVLTPLILILISYGYIAKAVLRMKSKAGQRKAMNTCGSHLTVVSIFYGTIIYMYLQPGNSASKDQGKFLTLFYTIITPSLNPLIYTLRNKDMKDALKKLMRVHHKSTKIKRNCKS

SEQ ID NO: 110 - protein, 314 aa, Artificial Sequence
  OR2W3 consensus-c
MDGTNGSTQTHFILLGFSDRPHLERILFVVILIAYLLTLVGNTTIILVSRLDPHLHTPMYFFLTHLSFLDLSFTTSSIPQLLYNLNGCDKTISYTGCAIQLFLFLGLGGVECLLLAVMAYDRFVAVCKPLHYMVIMNPRLCRGLVSVAWGCGVANSLAMSPVTLRLPRCGHHEVDHFLCEMPALIRMACVNTAAVEGTVFVLAVGIVLSPLVFILVSYGYIVRAVLQIRSASGRQKAFNTCGSHLTVVSLFYGNIIYMYMQPGNSSSQDQGKFLTLFYNIVTPLLNPLIYTLRNKEVKGALRRLLLGKRELGKE

SEQ ID NO: 111 - protein, 311 aa, Artificial Sequence
  OR2Y1 consensus-c
MGSFNTSFEEGFILVGFSDWPQLEPILFVFILIFYSLTLFGNTTIIALSRLDLRLHTPMYFFLSHLSFLDLCYTTSTVPQLLINLCGLDRTISYGGCVAQLFIYLALGSTECVLLVVMAFDRYAAVCRPLHYTTIMHPHLCQTLAIASWVGGFVNSLIQTGLAMAMPLCGHRLNHFFCEMPVFLKLACEDTEGTEAKMFVARVIILVVPAALILGSYVHIAHAVLRVKSMAGRRKAFGTCGSHLLVVFLFYGSAIYTYLQPIHNYSESEGKFVALFYTIITPMLNPLIYTLRNKDVKGALWKVLGRGRDSG

SEQ ID NO: 112 - protein, 315 aa, Artificial Sequence
  OR3A2 consensus-c
MEPEAGTNRTAVTEFILLGLVETEELQSVVFVLFLFAYLVTVGGNLSILAAILVEPKLHTPMYFFLGNLSVLDVGCITVTVPAMLGRLLSHKRTISYDACLSQLFFFHLLAGMDCFLLTAMAYDRFLAICRPLTYSTRMSQTVQRILVAVSWACAFTNALTHTIALTTLNFCGPNEVNHFYCDLPQLFQLSCSSTQLNELLLFAVGFIMAGTPLVLIITSYIHVAAAVLRIRSVEGRKKAFSTCGSHLTVVCLFYGTGIFNYMRLGSEEASDKDKGVGVFNTVINPMLNPLIYSLRNPDVQGALWRVLVGRRSLT

SEQ ID NO: 113 - protein, 314 aa, Artificial Sequence
  OR4A16 consensus-c
MGPSNNVTEFVLLGLTQDPDGQKALFVMFLLIYIVTMVGNLLIVVTVIASPSLGSPMYFFLAYLSLMDAVYSTAMSPKLIIDLLCDKKTISFSACMGQLFIEHLFGGAEVFLLVVMAYDRYVAICKPLHYLTIMNRQVCILLLVVAWIGGFVHSVVQIVFVYNLPFCGPNVIDHFICDMYPLLELACTDTYFIGLTVVANGGAICMVIFILLLISYGIILNSLKTYSQEGRRKALSTCSSHITVVVLFFVPCIFMYVRPVSNFPIDKSMTVVYTVITPMLNPLIYTLRNSEMKNAMKKLWCKKLTIVRKRVSPT

SEQ ID NO: 114 - protein, 311 aa, Artificial Sequence
  OR4C15 consensus-c
MQNQSFVTEFVLLGLSQNPNVQKIVFVVFLFVYIATVGGNMLIVVTILSSPALLGSPMYFFLAFLSFLDACFSSVITPKMIVDSLYERKTISFEGCMMQLFAEHFFAGVEVIVLTAMAYDRYVAICKPLHYSSIMNWRLCGILMGVAWTGGFLHSMIQILFTFQLPFCGPNVIDHFMCDLYPLLELACTDTHIFGLLVVANSGFICIIIFSLLLVSYGVILFSLRTHSSEGRRKALSTCGSHIAVVVLFFVPCIFVYARPPSAFSFDKMVAIFYTILTPLLNPLIYTFRNKEVKNAMRKIWNRLMVVSDEK

SEQ ID NO: 115 - protein, 314 aa, Artificial Sequence
  OR4D5 consensus-c
MNPANHSQVTGFVLLGLSQVWELRFLFFTVFSAVYLMTVTGNLLIVAIVTSDPRLHTTMYFLLGNLSFLDFCYSSITAPRMLVDLLSGNPTISFGGCLTQLFFFHFIGGIKIFLLTVMAYDRYVAISQPLRYTLIMNQTVCGLLMAASWVGGFIHSIVQVGLTIQLPFCGPDKLDNFYCDVPQLIKLACTDTFVLELLMVSNNGLVTLMCFLVLLGSYTALLVMLRSHSREGRSKALSTCASHIAVVTLIFVPCIYIYARPFRTFPMDKAVSVLYTMVTPMLNPAIYTLRNKEVIMAMKKLWRRQKDPLGPLEH

SEQ ID NO: 116 - protein, 314 aa, Artificial Sequence
  OR4D6 consensus-c
MDQINHTNVKEFVFLELTRFRELEFFLFVVFLAVYVTTVLGNALIVVTITCESRLHTPMYFLLRNKSVLDIVFSSITVPKFLVDLLSERKTISYNGCMAQIFFFHFAGGADIFFLSVMAYDRYLAIAKPLHYVTIMRREVWVALVVASWVGGGLHSIVQIILMLPLPFCGPNTLDAFYCDVPQVVKLACTDTFALELLMISNNGLVTLLWFLLLLGSYTVILVMLRSHSGEGRNKALSTCTSHILVVTLHFVPCVYIYCRPFTTLPMDTAVSINNTVITPMLNPMIYTLRNQEMKSAMQRLQRRLGPSESRKLG

SEQ ID NO: 117 - protein, 312 aa, Artificial Sequence
  OR4F15 consensus-c
MDGMNHSVVSEFVFLGLTNSWEIQLLLFVFSLLFYFASMMGNLVIVFTVTMDAHLHSPMYFLLANLSVIDMAFCSITAPKMICDIFKKHKAISFRGCITQIFFSHAVGGTEMVLLIAMAFDRYVAICKPLHYLTIMSPRMCLYFLVTSWIIGLIHSLVQLVFVVDLPFCGPNVLDSFYCDLPRLLRLACTNTQELEFMVTVNSGLISVGSFVLLVISYIFILFTVWKHSSGGLSKALSTLSAHITVVVLFFGPLMFFYTWPSPTSHLDKYLAIFDAFITPFLNPVIYTFRNKEMKVAMRRLCSRLVHYRKIS

SEQ ID NO: 118 - protein, 324 aa, Artificial Sequence
  OR4K15 consensus-c
MNETNHSRVTEFVLLGLSSSRELQPFLFLIFSLLYLAILLGNFLIILTVTSDSRLHTPMYFLLANLSFIDICVASFATPKMIADFLVERKTISFDACLAQIFFVHLFTGSEMVLLVSMAYDRYVAICKPLHYMTIMSRRVCIILVLISWFVGFIHTTSQLAFTVNLPFCGPNQVDSFFCDLPLVTKLACIDTYVVSLLIVADSGFLSLSSFLLLVVSYTVILITVRNRSSASMAKARSTLTAHITVVTLFFGPCIFIYVWPFSSYSVDKVLAVFYTIFTPILNPVIYTLRNKEVKAAMSKLKSRYLKPGQVSVVIRNVLFLETK

SEQ ID NO: 119 - protein, 313 aa, Artificial Sequence
  OR4Q3 consensus-a
MKKEQDSNVTEFVLLGLSSSWELQLFLFLLFLFFYIAIVLGNLLIVVTVQVHAHLLQSPMYYFLGHLSFIDLCLSCVTVPKMLGDFLQQSKSISFSGCLAQIYFLHFLGASEMFLLTVMAYDRYVAICNPLRYLTVMNPQLCLWLVLACWCGGFIHSIMQVILVIQLPFCGPNELDNFYCDVPQVIKLACMDTYVVEVLMIANSGLLSLVCFLVLLFSYAIILITLRTHFRQGQNKVLSTCASHLTVVSLIFVPCVFIYLRPFCSFSVDKIFSVFYTVITPMLNPLIYTLRNADMKTAMKKLRIKPCGIPLPC

SEQ ID NO: 120 - protein, 313 aa, Artificial Sequence
  OR4Q3 consensus-b
MKKEQDSNVTEFVLLGLSSSWELQLFLFLLFLFFYVAIVLGNLLIVVTVQADAHLLQSPMYYFLGHLSFIDLCLSCVTVPKMLGDFLQQGKSISFSGCLAQIYFLHFLGASEMFLLTVMAYDRYVAICNPLHYLTVMNRQLCLWLVLACWCGGFIHSIMQVILVIQLPFCGPNELDNFYCDVPQVIKLACMDTYVVEVLMVANSGLLSLVCFLVLLFSYAIILITLRTHFCQGQNKALSTCASHLMVVSLIFVPCIFIYLRPFCSFSVDKIFSVFYTVITPMLNPLIYTLRNTDMKTAMKKLRIKPCGIPLPC

SEQ ID NO: 121 - protein, 313 aa, Artificial Sequence
  OR4Q3 consensus-c
MKKENDSKVTEFVLLGLSSSWELQLFLFLLFLLFYIAIVLGNLLIVVTVQADAHLLQSPMYYFLGHLSFIDLCLSCVTVPKMLGDFLQQGKSISFSGCLAQIYFLHFLGASEMFLLTVMAYDRYVAICNPLHYLTVMNRQLCLQLVFACWCGGFIHSITQVILVIQLPFCGPNELDNFYCDVPQVIKLACMDTYVVEVLMVSNSGLLSLVCFLVLLFSYAVILITLRTRFRQGQSKALSTCASHLTVVSLIFVPCVFIYLRPFCSFSVDKVFSVFYTVITPMLNPLIYTLRNADMKTAMKKLRKKPCGIPLPC

SEQ ID NO: 122 - protein, 311 aa, Artificial Sequence
  OR4S2 consensus-a
MEKINNVTEFIFWGLSQSPEIEKVCFVVFSFFYIIILLGNLLIMLTVCLNNLFKSPMYFFLSFLSFVDICYSSVTAPKMIVDLLAKDKTISYVGCMLQLFGVHFFGCTEIFILTVMAYDRYVAICKPLHYMTIMDQERCNKMLLGTWVGGFLHSIIQVALVVQLPFCGPNEIDHYFCDVHPVLKLACTDTYIVGVVVTANSGTIALGSFVILLISYSIILVSLRKQSAEGRRKALSTCGSHIAVVIIFFGPCTFMYMRPDTTFSEDKMVAVFYTIITPMLNPLIYTLRNAEVKNAMKKLWGRNVFLEAKGK

SEQ ID NO: 123 - protein, 311 aa, Artificial Sequence
  OR4S2 consensus-b
MEKINNVTEFIFWGLSQSPEVQRVCFVVFLFFYIAIVLGNLLIVLTVCLSNSLKSPMYFFLSFLSFVEICYSSVTAPKMIVDLLAKDKTISYVGCMLQLFFVHFFGCTEIFLLTVMAYDRYVAICKPLHYMTIMNRQTCNKLVLGTWVGGFLHSIIQVLLVVQLPFCGPNVIDHYFCDLHPVLKLACTDTFIVGVVVTANSGTIALGSFVILLISYSIILVSLRKQSAEGRRKALSTCGSHITVVILFFGPCIFMYMRPSTTFSEDKMVAVFYTIITPMLNPLIYTLRNAEVKNAMKKLWGRNVFLEAKGK

SEQ ID NO: 124 - protein, 311 aa, Artificial Sequence
  OR4S2 consensus-c
MEKINNVTEFIFWGLSQNPEVEEVCFVVFSFFYIIILLGNLLIMLTVCLGNLFKSPMYFFLNYLSFVDICYSSVTAPKMIVDLLAKDKTISYVGCMLQLFGVHFFGCTEIFILTVMAYDRYVAICKPLHYMTIMDRERCNKMLLGTWVGGFLHSIIQVALVVQLPFCGPNEIDHYFCDVHPVLKLACTDTYIVGVVVTANSGTIALGSFVILLISYTVILVSLRKQSAEGRRKALSTCGSHIAVVIIFFGPCTFMYMRPDTTFSEDKMVAVFYTIITPMLNPLIYTLRNAEVKNAMKKLWGRKVFLEAKGK

SEQ ID NO: 125 - protein, 319 aa, Artificial Sequence
  OR5A2 consensus-c
MAVGRNNTIVTKFILLGFSDHPQMKIFLFVLFLGIYLLTLAWNLSLIALIRMDSHLHTPMYFFLSNLSFLDICYVSSTAPKMLSDIITEQKTISFVGCATQYFVFCGMGLTECFLLAAMAYDRYAAICNPLLYTALISHTLCLKMVAGAYVGGFLSSLIETYSVYQHDFCGPNMINHFFCDLPPVLALSCSDTFTSQVVTFIVGVVVGIVSVLVILISYGYIVAAVLKISSAKGRTKAFSTCASHLTAVTLFYGSGLFMYMRPSSSYSLNRDKVVSIFYALVIPMVNPIIYSLRNKEIKNAMRKAVERDPGLSHGGPFF

SEQ ID NO: 126 - protein, 320 aa, Artificial Sequence
  OR5C1 consensus-c
MNSENFTWARVAPAEFILLGITDRWDLRVTLFLIFLPVYLVSLLGNVGMVLLIRVDARLHTPMYFFLANLSLLDACYSSAIGPKMLVDLLLPRATIPYTACALQMFVFAGLADAECCLLAAMAYDRYVAIGNPLLYTTAMSRRLCLALLGASGLGGAVSAFVHTTFTFRLSFCRSREVNSFFCDIPPLLAISCNDTSLNELLLFAVCGFIQTATVLAIAVSYGFIAGAVIRMRSAEGRRRAASTCGSHLTAVAMLYGTLIFMYLRPSSSYALDTDKMASVFYTLVIPALNPLIYSLRNKEVKEALRRTWSRFCCPGQGSQ

SEQ ID NO: 127 - protein, 310 aa, Artificial Sequence
  OR5W2 consensus-c
MDWENCSSLTEFIFLGITNNPEMKVTLFTVFLAVYLINLLANLGMIILIRMDSQLHTPMYFFLSHLSFCDLCYSTAIGPKMLVDLLAKNKSIPFYGCALQFLIFCIFADSECLLLAVMAFDRYKAISNPLLYTVNMSSRVCSLLMAGVYLVGIADALIHTTLTFRLCFCGSNEINHFFCDIPPLLLLSCSDTQVNELVLFTVFGFIELSTISGVLVSYCYIILSVLKIHSAEGRFKAFSTCTSHLTAVAIFQGTMLFMYFRPSSSYSLDQDKMTSLFYTLVIPMLNPLIYSLRNKDVKEALKKLKNKILF

SEQ ID NO: 128 - protein, 327 aa, Artificial Sequence
  OR6A2 consensus-c
MEWRNQSGRVSEFVLLGFPAPAPLRALLFALSLLAYVLVLTENTLIIMAIRNHPTLHKPMYFFLANMSFLEIWYVTVTIPKMLAGFVGSKQDHGQLISFEGCMTQLYFFLGLGCTECVLLAVMAYDRYVAICHPLHYPVIVSGRLCVQLAAGSWAGGFGISMVKVFLISRLSYCGPNIINHFFCDVSPLLNLSCTDMSTAELTDFVLAIFILLGPLSVTGASYMAITGAVMRIPSAAGRHKAFSTCASHLTVVIIFYAASIFIYARPKALSAFDTNKLVSVLYAVIVPLLNPIIYCLRNQEVKRALRCTLHLYQGQDPDPKKASRNV

SEQ ID NO: 129 - protein, 312 aa, Artificial Sequence
  OR6B2 consensus-c
MRGENVTKVSTFILLGFPTAPGLQYLLFLLFLLTYLFVLVENLAIILTVWSSTSLHRPMYYFLGSMSFLEIWYVSDIIPKMLDGFLLQRKRISFVGCMTQLYFFSSLVCTECVLLASMAYDRYVAICHPLRYQVIMTTGLCVQLVAFSFVSGFTISVIKVYFISSATFCGSNVLNHFFCDISPILKLACTDFSTAELVDFILAFIILVFPLLATVLSYGHITLAVLRIPSATGRWRAFSTCASHLTVVTIFYTAMIFMYVRPQAIDSRSSNKLISAVYTVLTPIINPLIYCLRNKEFKDALKKALGLGQTSH

SEQ ID NO: 130 - protein, 310 aa, Artificial Sequence
  OR6C1 consensus-c
MRNHTEITEFILLGLSDDPQLQVVIFVFLLITYMLSITGNLTIITLTLLDSHLQTPMYFFLRNFSLLEVSFTTVSIPKFLGTIITGDKTISFNDCIAQFFILLGVTEFYLLAAMSYDRYIAICKPLHYMTIMNRRVCTLLVFASWLVSFLIIFPALMLLLQLDYCRSNIIDHFTCDYFPLLQLSCSDTKFLEIMGFSCAVFTLMFTLALIFLSYIYIIRTILRIPSTSQRTKAFSTCSSHMIVISISYGSCIFMYIKPSAKDRVSLSKGVAVLNTSVAPMLNPFIYSLRNQQVKRAFMDMARKTVFFTSK

SEQ ID NO: 131 - protein, 325 aa, Artificial Sequence
  OR6Y1 consensus-a
MTTIILEVDNRTVTTHFILLGFPTRPAFQLLLFSVFLATYLLTLLENLLIILAIHSDGQLHKPMYFFLSHLSFLEMWYVTVISPKMLVDFLSHDKSISFNGCMTQLYFFVTFVCTEYILLAVMAFDRYVAICNPLRYPVIMTNQLCGTLAGGCWFCGLMTAMIKMVFIAQLHYCGTPQINHYFCDISPLLNVSCEDSSQAELVDFFLALMVIAIPLCVVVASYAAILATILRIPSAQGRQKAFSTCASHLTVVILFYSTTLFTYARPKLMYAYNSNKVVSVLYTVIVPLLNPIIYCLRNREVKAALRKTIHCRGSGPQGNGAFSS

SEQ ID NO: 132 - protein, 325 aa, Artificial Sequence
  OR6Y1 consensus-b
MTTIILEVDNHTVTTRFVLLGFPTRPAFQLLLFSIFLATYLLTLLENLLIILAIHSDGQLHKPMYFFLSHLSFLEMWYVTVISPKMLVDFLSHDKSISFNGCMTQLYFFVTFVCTEYILLAVMAFDRYVAICNPLRYPVIMTNQLCGTLAGGCWFCGLMTAMIKMVFIAQLHYCGMPQINHYFCDISPLLNVSCEDASQAELVDFFLALMVIALPLCVVVASYAAILATILRIPSAQGRQKAFSTCASHLTVVILFYSTTLFTYARPKLMYAYNSNKVVSVLYTVIVPLLNPIIYCLRNHEVKAALRKTVHCRGSGPQGNGAFSS

SEQ ID NO: 133 - protein, 325 aa, Artificial Sequence
  OR6Y1 consensus-c
MTTIILEVDNHTVTTHFILLGFPTRPAFQLLLFSIFLATYLLTLLENLLIILAIRSDGQLHKPMYFFLSNLSFLEMWYVTVISPKMLVDFLSHDKSISFNGCMTQLYFFVTFVCTEYILLAVMAFDRYVAICNPLRYPVIMTNQLCGTLAGGCWFCGLMTAMIKMVFIARLHYCGTPQINHYFCDISPLLNVSCEDSSQAELVDFFLALMVIAVPLCVVVASYAAILATILKIPSAQGRQKAFSTCASHLTVVILFYSTTLFTYARPKLMYAYNSNKVVSVLYTVIVPLLNPIIYCLRNREVKAALRKTIHCRGSGPQGNGAFSS

SEQ ID NO: 134 - protein, 309 aa, Artificial Sequence
  OR7A17 consensus-a
MEPENDTGISEFLLLGLSEEPELQPFLFGLFLSMYLVTVLGNLLIILATISDSHLHTPMYFFLSNLSFADICFISTTVPKMLINIQTQSRVITYAGCITQMCFFVLFGGLDSLLLAVMAYDRFVAICHPLHYTVIMNPRLCGLLVLASWMIAALNSLSQSLMVLWLSFCTDLEIPHFFCELNQVIHLACSDTFLNDMGMYFAAGLLAGGPLAGILYSYSKIVSSIRAISSAQGKYKAFSTCASHLSVVSLFCCTGLGVYLTSAATHNSHTSATASVMYTVATPMLNPFIYSLRNKDIKRALKMSFRGKQ

SEQ ID NO: 135 - protein, 309 aa, Artificial Sequence
  OR7A17 consensus-b
MEPENDTGISEFLLLGLSEEPELQPFLFGLFLSMYLVTVLGNLLIILATISDSHLHTPMYFFLSNLSFVDICFVSTTVPKMLVNIQTQSKVITYAGCITQMCFFVLFGGLDSFLLTVMAYDRFVAICHPLHYTVIMNPRLCGLLVLASWIMSALNSLLQSLMVLWLSFCTDLEIPHFFCELNQVIHLACSDTFLNDMVMYFAAGLLGGGPLVGILYSYSKIVSSIRAISSAQGKYKAFSTCASHLSVVSLFYCTGLGVYLSSAATHNSHSSATASVMYTVVTPMLNPFIYSLRNKDIKRALKMFFRGKQ

SEQ ID NO: 136 - protein, 309 aa, Artificial Sequence
  OR7A17 consensus-c
MEPENDTGISEFLLLGLSEEPELQPLIFGLFLSMYLITVFGNLLIILATISDSHLHTPMYFFLSNLSFADICFTSTTIPKMLINIQTQSKVITYAGCITQMYFFVLFAGLDSFLLTVMAYDRFVAICHPLHYTVIMNPRLCGLLVLVSWIISALNSLLQSLMVLWLSFCTDLEIPHFFCELNQVIHLACSDTFLNDMVMYFAAGLLGGGPLVGILYSYSKIVSSIRAISSAQGKYKAFSTCASHLSVVSLFYCTGLGVYLSSAATHNSHSSATASVMYTVVTPMLNPFIYSLRNKDIKRALKRSFGGKQ

SEQ ID NO: 137 - protein, 312 aa, Artificial Sequence
  OR7D4 consensus-a
MEAENLTELSEFLLLGLSDDPELQPVLFGLFLSMYLVTVLGNLLIILAVSSDSHLHTPMYFFLSNLSFVDICFISTTVPKMLVNIQARSKDISYMGCLTQVYFLMMFAGMDNFLLTVMAYDRFVAICHPLHYTVIMNPCLCGLLVLASWFIIFWVSLVHILLMKRLTFSTGTEIPHFFCELAQVLKVACSDTLLNNIVLYVATALLGVFPVAGILFSYSQIVSSLMRMSSTEGKYKAFSTCGSHLCVVSLFYGTGLGVYLSSAVTHSSQSSSTASVMYTMVTPMLNPFIYSLRNKDVKGALGRLLSRAASCL

SEQ ID NO: 138 - protein, 312 aa, Artificial Sequence
  OR7D4 consensus-b
MEAENLTELSEFLLLGLSEDPELQPVLFGLFLSMYLVTVLGNLLIILAISSDSHLHTPMYFFLSNLSFVDICFISTTVPKMLVNIQTRSKDISYMGCLTQVYFFMMFAGLDNFLLTVMAYDRFVAICHPLHYTVIMNPRLCGLLVLASWFIIFWFSLLHILLMKRLTFCTGTEIPHFFCELAQVLKVACSDTFLNNIVLYVATALLGVFPLAGILFSYSQIVSSLMRMSSTKGKYKAFSTCGSHLCVVSLFYGTGLGVYLSSAVTHSSQSSSTASVMYTVVTPMLNPFIYSLRNKDVKGALGRLLSRADSCP

SEQ ID NO: 139 - protein, 312 aa, Artificial Sequence
  OR7D4 consensus-c
MEAENHTEVSEFLLLGLSEDPELQPLLFGLFLSMYLVTVLGNLLIILAISSDSHLHTPMYFFLSNLSFVDICFISTTVPKMLVNIQAQSKDISYMGCLTQVYFFMIFAGMDNFLLTVMAYDRFVAICHPLHYTVIMNPRLCGLLVLASWFIIFWVSLVHILLMKRLTFCTGTEIPHFFCELAQVLKVACSDTLINNIVLYVATALLGVFPLTGILFSYSQIVSSLMRMSSTKGKYKAFSTCGSHLSVVSLFYGTGLGVYLSSAVTHSSQSSSIASVMYTVVTPMLNPFIYSLRNKDVKGALGRLLSRAASCP

SEQ ID NO: 140 - protein, 317 aa, Artificial Sequence
  OR10A2 consensus-c
MAGGNWTRVSEFILMSFSSLPTEIQSLLFLTFLIIYLVTLMGNSLIILVTLADPMLHSPMYFFLRNLSFLEIGFNLVIVPKMLGTLLAQDTTISFLGCATQMYFFFFFGVAECFLLATMAYDRYVAICSPLHYPVIMNQRTRAKLAAASWFPGFPVATVQTTWLFSFPFCGTNKVNHFFCDSPPVLRLVCADTALFEIYAIVGTILVVMIPCLLILCSYTRIAAAILKIPSAKGKHKAFSTCSSHLLVVSLFYVSLSLTYFRPKSNNSPESKKLLSLSYTVVTPMLNPIIYSLRNNEVKNALSRTFSKALGLRNCIP

SEQ ID NO: 141 - protein, 315 aa, Artificial Sequence
  OR10A4 consensus-c
MMWGNWTIVSEFVLVSFSALSSELQALLFLLFLTIYLVTLMGNVLIILVTTADSALQSPMYFFLRNLSFLEIGFNLVIVPKMLGTLIIQDTTISFLGCATQMYFFFFFGAAECCLLATMAYDRYVAICDPLRYPVIMGRRACAQLAAASWFSGFPVATVQTTWIFSFPFCGPNRVNHFFCDSPPVIALVCADTSLFELEALTATVLFILFPFLLILGSYVRILSTIFRMPSAEGKHKAFSTCSSHLLVVSLFYSTAILTYFRPRSSTSPESKKLLSLSYTVVTPMLNPIIYSLRNSEVKAALRRVIHRTLGPQKL

SEQ ID NO: 142 - protein, 312 aa, Artificial Sequence
  OR10D3 consensus-c
MEVKNCSMVTEFILLGIPHTEGLETTLFVLFLPFYACTLLGNVSILVAVLSSARLHTPMYFFLGNLSVFDMGFSSVTCPKMLLYLMGLSRLISYKDCVSQLFFFHFLGSIECFLYTVMAYDRFTAICYPLRYTVIMNPRICVALAVGTWLLGCIHSSILTSLTFTLPYCGPNEVDHFFCDIPALLPLACADTSLAQRVSFTNVGLVSLVCFLLILLSYTRITISILSIRTTEGRRRAFSTCSAHLIAILCAYGPIITVYLQPTPNPMLGTVVQILMNLVGPMLNPLIYTLRNKEVKTALKKILHRTGHVPES

SEQ ID NO: 143 - protein, 319 aa, Artificial Sequence
  OR10Q1 consensus-c
MPVGKPVLNQSGPTEFVFRVFTTVPEFQALLFLLFLLLYLMILCGNTAIIWVVCTHSSLRTPMYFFLSNLSFLEICYTTVVVPLMLSNILGAQKPIPLAGCGAQMFFFVTLGSTDCFLLAVMAYDRYVAICHPLHYTLIMTQKLCTQMVGGALGLALFLSLQLTALIFTLPFCGHRREINHFLCDVPPVLRLACADIRVHQAVLYVVGILVLTVPFLLICVSYVFITCAILRIRSAEGRRRAFSTCSSHLTVVLLQYGCCSLVYLRPRSSTSEDEDRQIALVYTFVTPLLNPLIYTLRNKDVKGALRSAIIRKAASDAN

SEQ ID NO: 144 - protein, 313 aa, Artificial Sequence
  OR10Z1 consensus-c
MGQTNATSWRGFVFLGFSSFGELQLLLFALFLSLYLVTLTSNVFIIIVIRLDSHLHTPMYLFLSFLSFSETCYTLGIIPRMLSGLVMGDQAISYVGCAAQMFFSASWACTNCFLLAVMGFDRYVAICAPLHYASRMNPTLCAQLVGTSFLSGYLFGLGMTLVIFHLSFCSSHEIQHFFCDTPPVLSLACGDTGLSELGILILSLLVLLVSFFFITISYAYILAAILRIPSAEGRKKAFSTCASHLTVVIIHYGCASFMYLRPKASYSLERDQLIAVTYTVVTPLLNPIVYSLRNRAVQTALRNAFRGRLLGKG

SEQ ID NO: 145 - protein, 315 aa, Artificial Sequence
  OR11H1 consensus-c
MNVSEPNSSFAFVREFILLGFSCEWKIQILLFSLFTTTYALTITGNGAIVCALWCDRRLHTPMYIFLGNFSFLEIWYVSSTVPKMLVNFLSEKKTISFAGCFLQFYFFFSLGTSECFLLAVMAFDRYLAICRPLHYPNIMTGHLCTKLVIICWVCGFLWFLIPIVLISQMPFCGPNIIDHVVCDPGPLFALACVSAPRTQLLCYTLSSLVIFGNFLFILGSYTLVLLAVLRMPSATGRHKAFSTCGSHLAVVSLFYGSLMVMYVSPGLGHSAGMQKVATLFYAMVTPLFNPLIYSLRNKEIKAALRKVLGSSNII

SEQ ID NO: 146 - protein, 324 aa, Artificial Sequence
  OR11H4 consensus-a
MSFFFVDLRPMNRSATHVVTEFILLGFPGCWKIQIFLFSLFLVIYVLTLLGNGAIIYAVRCNPRLHTPMYFLLGNFAFLEIWYVSSTVPNMLANILSKTKAISFSGCFLQFYFFFSLGTTECLFLAVMAYDRYLAICHPLQYPAIMTGRFCGKLVSFCWLIGFLGYPIPIFFISQLPFCGPNIIDHFLCDMDPLMALSCAPAPITECIFYTQSSLVLFFTSIYILRSYILLLRAVFQVPSAAGRRKAFSTCGSHLVVVSLFYGTVMVMYVSPTYGIPTLWQKILTLVYSVMTPLFNPLIYSLRNKDMKLALRNVLFGMRVRQNS

SEQ ID NO: 147 - protein, 324 aa, Artificial Sequence
  OR11A4 consensus-b
MSFFFVDLRPMNRSATHIVTEFVLLGFPGCWKIQIFLFSLFLVVYVLTLLGNGAIICAVRCDPRLHTPMYFLLGNFAFLEIWYVSSTVPNMLVNILSKTKAISFSGCFLQFYFFFSLGTTECLFLAVMAYDRYLAICHPLHYPAIMTGRFCGKLVSFCWLIGFLGYPIPIFFISQLPFCGPNIIDHFLCDMDPLMALSCAPAPITECIFYTQSSLVLFFTSMYILRSYTLLLRAVFQVPSAAGRRKAFSTCGSHLVVVSLFYGTVMVMYVSPTYGIPTLMQKILTLVYSVVTPLFNPLIYSLRNKDMKLALRNVLFGMRIRQNS

SEQ ID NO: 148 - protein, 324 aa, Artificial Sequence
  OR11H4 consensus-c
MSFFFVDLRPMNRSATHIVTEFVLLGFPGCWEIQIFLFSLFLVIYVLTLLGNGAIICAVRWDPRLHTPMYFLLGNFAFLEIWYVSSTVPNMLANILSKTKAISFSGCFLQFYFFFSLGTTECLFLAVMAYDRYLAICHPLHYPTIMTGRLCGKLVSLCWLIGFLGYPIPIFFISQLPFCGPNIIDHFLCDMDPLMALSCAPAPITECIFYTQSSLVLFFTIMYILRSYILLLRAVFQVPSAAGRRKAFSTCGSHLVVVSLFYGTVMVMYVSPTYGIPTLMQKILTLVYSVMTPLFNPLIYSLRNKDMKLALRNVLFGMRISQNS

SEQ ID NO: 149 - protein, 320 aa, Artificial Sequence
  OR13C8 consensus-c
MERTNDSTLTEFVLVGLSAHPKLQTVFFVLVLWMYLMILLGNGVLISVIIYDSHLHTPMYFFLCNLSFLDICYTSSSVPLILDSFLTVRKRVSFSGCMVQMFLSFAMGATECVLLGMMALDRYVAICYPLRYPVIMSKGAYVPMAAGSWVTGLVDSVVQTSLAMQLPFCANNVINHFVCEILAILKLACADISINVISMAGSNLIVLVIPLLVISISYIFIVATILRIPSTEGKRKAFSTCSAHLTVVIIFYGTIFFMYAKPKSKASVGSDNQDIIEALISLFYGVMTPMLNPLIYSLRNKDVKAAVKNMLGRKNFSDGK

SEQ ID NO: 150 - protein, 307 aa, Artificial Sequence
  OR13G1 consensus-c
MNHSVVTEFIILGLTKKPELQGILFLFFLIVYLVAFLGNMLIVIAIIYNNTLHTPMYVFLLTLAVVDIICTTSIIPKMLGTMLTSENTISYGGCMSQLFFFTWSLGAEMVLFTTMAYDRYVAICFPLHYSTIMNHHMCVALLSMVMAIAVTNSWVHTGLILRLTFCGPNTIDHFFCEIPPLLALSCSPVRINEVMVYVADITLAIGDFILTCISYGFIIAAILRIRTAEGKRKAFSTCSSHLIVVSLYYSPVIYTYIRPASSYSFERDKVVAALYTLVTPTLNPMVYSFRNKEMQAGIRKVFAFLKH

SEQ ID NO: 151 - protein, 304 aa, Artificial Sequence
  OR52A4 consensus-c
MALPITNGTLFMPFVLTFIGIPGLESVQCWIGIPFCAMYIIALIGNSLLLIIIKSEPSLHEPMYIFLAMLGATDISLSTSIVPKMLGIFWFHLPEIYFDACLFQMWLIHTFQGIESGVLLAMALDRYVAICYPLRHAIVFTRQLVTYIVVGVTLRPAILVIPCLLLIKCRLKLYRTKLISHTYCEHMALVKLATEDVYINKFYGILGAFIVGGLDFIFITLSYIQIFITVFHLPLKEARLKVFNTCIPHICVFFQFYLLAFFFIFYSQIWILYPIIRTYHLVQSLPTGPTIPQPLYLWVKDQAH

SEQ ID NO: 152 - protein, 313 aa, Artificial Sequence
  OR56A4 consensus-c
MASPSNYSTAPVSEFLLICFPNYQSWQHWLSLPLSLLFLLAMGANATLLITIRLEASLHEPMYYLLSLLSLLDIVLCLTVIPKVLAIFWFDLRSISFSACFLQMFIMNSFLTMESCTFMVMAYDRYVAICHPLRYPSIITDQFVARAAIFVVARNGLVSLPVPILSSRLRYCAENIIKNCICTNLSVSKLSCDDITFNRLYQFVAGWTLLGSDLILIVLSYSFILKAVLRIKAEGAVAKALSTCGSHFILILFFSTVLLVLVITNLARKRIPPDVPILLNILHHLIPPALNPIVYGVRTKEIKQGIQKLLRRL

SEQ ID NO: 153 - protein, 318 aa, Artificial Sequence
  OR2B11 consensus-c
MRSDNQSFLGDPPKAFILLGVSDRPWLELPLFVVLLVSYVLAMLGNIAIILVSRLDPQLHSPMYIFLSHLSFLDLCYTTTTVPQMLVNMGSSQKTISYGGCTVQYAIFHWLGCTECIVLAAMALDRYVAICEPLRYAVIMHRALCQQLVAVAWLSGFGNSLVQVVLTVQLPFCGRQVLNNFFCEVPAMIKLSCADTAVNDATLAVLVAFFVLVPLALILLSYGFIARAVLRIQSSKGRHKAFGTCSSHLVVVSLFYLPAIYMYLQPPSSYSQEQGKFISLFYSIITPTLNPFIYTLRNKDVKGALRRLLARIWRLCRR

SEQ ID NO: 154 - protein, 320 aa, Artificial Sequence
  OR2C3 consensus-c
MMEIANVSSPEVFVLLGFSARPSLEPILFIVVLGFYVVSILGNGIIILVSCMDVHLHTPMYFFLANLSFLDISFTTSIVPQLLVNLWGPQKTISYGGCVVQFYISHWLGATECVLLAVMSYDRYAAICRPLHYTVIMHPQLCLGLALASWLGGLTTSMVGSTLTMLLPLCGNNRIDHFFCEMPLIMQLACVDTSLNEVEMYVASFIFVVLPLGLILVSYGHIARAVLKIRSAEGRRKAFNTCSSHVAVVSLFYGSIIFMYLQPAKSNSHEQGKFIALFYTVVTPMLNPLIYTLRNKDVKSALRHMVLENCCGFAGKLAQI

SEQ ID NO: 155 - protein, 313 aa, Artificial Sequence
  OR2G2 consensus-c
MVRHTNESNLAGFILLGFSDYPQLQKVLFVVILILYLLTILGNTTIILVSRLEPKLHTPMYFFLSHLSFLDLCFTSSVIPQLLVNLWEPMKMITYGGCVVQLYVSLALGSTECVLLAVMSYDRYVAVCRPLHYTVLMHPHLCMALASMAWLSGVATTLVQSTLTLQLPFCGHRQVDHFICEVPVLIKLACVDTTFNEAELFVASVLFLIVPVSFILVSYGYIAQAVLRIKSATGRQKAFGTCSSHLMVVIIFYGTIIFMYLQPAKSRSKDQGKFVSLFYTVVTPMLNPLIYTLRNKEVKGALKKVLGKALGVN

SEQ ID NO: 156 - protein, 314 aa, Artificial Sequence
  OR2G3 consensus-c
MELANESSLMGFILLGFSDHPRLEAVLFVFVLFFYLLTLVGNFTIIIISYLDPPLHTPMYFFLSNLSLLDLCFTTSLAPQTLVNLRGPEKTITYGGCVVQLYISLALGSTECILLAVMALDRYVAVCKPLHYVVIMNPRLCQQLASISWLSGLANSLIHATFTLQLPLCGNHRLDHFICEVPALLKLACVDTTVNELVLFVVSVLFLLIPPALILISYGFITQAVLRIKSVEARHKAFSTCSSHLTVVIIFYGTIIYMYLQPSDSYAQDQGKFISLFYTMVTPTLNPIIYTLRNKDVKEALKKLLSGKLCSLQT

SEQ ID NO: 157 - protein, 312 aa, Artificial Sequence
  OR2L2 consensus-c
MENYNQTSTDFILLGLFPSSRIGLFLFILIVLIFLMALIGNLSMILLIFLDTHLHTPMYFLLSQLSLIDLNYISTIVPKMAYDFLFGNKSISFIGCGIQSFFFLTLAGAEGLLLASMAYDRYVAICFPLHYPIRISKRVCVLMITGSWMIGSINSCAHTVYALCIPYCKSRAINHFFCDVPAMLTLACTDTWVYEYTVFLSTTIFLLLPFIGIACSYGRVLLAVYRMHSAEGRKKAYSTCSTHLTVVTFYYAPFAYTYLRPRSLRSPTEDKVLAVFYTILTPMLNPIIYSLRNKEVMGALRRVIQRIFSVKM

SEQ ID NO: 158 - protein, 312 aa, Artificial Sequence
  OR2L3 consensus-c
MENYNQTSTDFILLGLFPPSRIGLFLFILIVLIFLMALIGNLSMILLILLDTHLHTPMYFLLSQLSLIDLNYISTIVPKMASNFLFGNKSISFIGCGVQSFFFLTLGGAEALLLTSMAYDRYVAICFPLHYPIRMSKRVCVLMITGSWIMGSINSCAHTVYALHIPYCRSRAINHFFCDVPAMLTLACMDTWVYEYTVFVSTTLFLVFPFIAISCSYGRVLLAVYRMKSAEGRKKAYSTCSTHLTVVTFYYAPFAYTYLRPRSLRSPTEDKVLAVFYTILTPMLNPIIYSLRNKEVMGALRRVSQRICSVKM

SEQ ID NO: 159 - protein, 312 aa, Artificial Sequence
  OR2L5 consensus-c
MENYNQTSTDFILLGLFPPSKIGLFLFILIVLIFLMALIGNLSMILLIFLDTHLHTPMYFLLSQLSLIDLNYISTIVPKMASDFLYGNKSISFIGCGIQSFFFLTLAGAEALLLTSMAYDRYVAICFPLHYPIRMSKRVCVLMITGSWMIGSINSCAHTVYALRIPYCKSRAINHFFCDVPAMLTLACTDTWVYEYTVFVSTTIFLVFPFTGIACSYGRVLLAVYRMHSAEGRKKAYSTCSTHLTVVTFYYAPFAYTYLRPRSLRSPTEDKVLAVFYTILTPMLNPIIYSLRNKEVMGALRRVIQNIFSVKM

SEQ ID NO: 160 - protein, 312 aa, Artificial Sequence
  OR2L8 consensus-c
MENYNQTSTDFILLGLFPPSRIGLFLFILIVLIFLMALFGNLSMILLIFLDTHLHTPMYFLLSQLSLIDLNYISTIVPKMASDFLHGNKSISFIGCGVQSFFFLTLAGAEALLLASMAYDRYVAICFPLHYPIRMSKRVCVLMITGSWIMGSINSCAHTVYVLHIPYCRSRAINHFFCDVPAMLTLACMDTWVYEYTVFVSTTLFLVFPFIGIACSYGRVLLAVYRMKSAEGRKKAYSTCSTHLTVVTFYYAPFVYTYLRPRSLRSPTEDKVLAVFYTILTPMLNPIIYSLRNKEVMGALRRVIQRICSVKM

SEQ ID NO: 161 - protein, 312 aa, Artificial Sequence
  OR2L13 consensus-c
MEKWNQTSNDFILLGLFPPNQTGLLLLLLIILIFFLASVGNSAMIHLIRVDPRLHTPMYFLLSQLSLMDLMYISTTVPKMAFNFLSGQKGISFLGCGVQSFFFLTMACSEGLLLASMAYDRYVAICHPLHYPIRMSKMMCVKMIIGSWILGSINSLAHTVYALHIPYCRSRAINHFFCDVPAMLPLACMDTWVYEYMVFVSTSLFLLLPFLGITASYGRVLFAVYHMRSKEGRKKAFTTCSTHLTVVTFYYAPFVYTYLRPRNLRSPAEDKILAVFYTILTPMLNPIIYSLRNKEVLGAMTRVFGIFSSLKE

SEQ ID NO: 162 - protein, 312 aa, Artificial Sequence
  OR2M2 consensus-c
MAWENQTFNSDFILLGIFNHSPPHIFLFSLVLGIFTVAFMGNTVMVLLIYLDTQLHTPMYFLLSQLSLMDLMLICTTVPKMAFNYLSGRKSISMAGCVTQIFFYVSLLGAECFLLAVMAYDRYVAICHPLRYTNLMNPKICGLMATSSWILGSTDGIIDVAATLSFSYCGSREIAHFFCDVPALLILSCTDTSIFEEVIFICCVVMLLFPVAIIIASYARVILAVIHMGSGEGRCKAFTTCSSHLMVVGMYYGAAMFIYMRPTSDHSPTQDKMVSAFYTILTPMLNPLIYSLRNKEVARAFMKILGKGKSES

SEQ ID NO: 163 - protein, 311 aa, Artificial Sequence
  OR2M4 consensus-c
MVWRNQTFNSDFILLGIFDHSPTHTFLFSLVLGIFTVAFMGNTAMVLLIYLDTQLHTPMYFLLSQLSLMDLMLICTTVPKMAFNYLSGRKSISLAGCGTQIFFYVSLLGAECFLLAVMAYDRYVAICHPLRYTILMNQKLCVLMTVASWILGSLDGIIVLAAVLSFSYCSSLEIHHFFCDVAALLPLSCTDTSAFERLLFICCVVMLILPVSVIILSYSHVLRAVIHMGSGESRRKAFTTCSSHLSVVGLYYGAAMFMYMRPASKHTPDQDKMVSAFYTILTPMLNPLIYSLRNKEVSRGLQKLLRKGKLI

SEQ ID NO: 164 - protein, 318 aa, Artificial Sequence
  OR2T1 consensus-c
MEEYNTSSTDFTFMGLFNRKETSGLLFAIISIIFFTALMANGVMIFLIQTDLRLHTPMYFLLSHLSFIDMMYISTIVPKMLVDYLLGQRTISFVGCTAQHFLYLTLVGAEFFLLGLMAYDRYVAICNPLRYPVLMSRRVCWMIIAGSWFGGSLDGFLLTPITMSFPFCNSREINHFFCEAPAVLKLACADTALYETVMYVCCVLMLLIPFSVVIASYARILTTVHRMSSVEGRKKAFATCSSHMTVVTLFYGAAMYTYMLPHSYHKPAQDKVFSVFYTILTPMLNPLIYSLRNKDVTGALKRALGRFKGPQRVSGGVF

SEQ ID NO: 165 - protein, 320 aa, Artificial Sequence
  OR2T4 consensus-c
MANITWMANHTGWSDFILVGLFRQSKHPALLCVVIFVVFLMALSGNAVLILLIHSDAHLHTPMYFFISQLSLMDMMYISVTVPKMLLDQVMGVNKISAPECGMQMFLYVTLAGSEFFLLATMAYDRYVAICHPLRYPVLMNHRVCLFLASGCWFLGSVDGFTFTPITMTFPFCRSREIHHFFCEVPAVLKLSCSDTSLYEIFMYLCCVLMLLIPVTVISSSYLFILLTIHRMNSAEGRKKAFATCSSHMTVVILFYGAAIYTYMLPSSYHTPEKDMMVSVFYTILTPVLNPLIYSLRNKDVMGALKKMLNVGPVFQETMK

SEQ ID NO: 166 - protein, 320 aa, Artificial Sequence
  OR2T5 consensus-c
MANITWMANHTGKSDFILVGLFSQSKHPALLCVVIFVVFLMALSGNAILILLIHSDAHLHTPMYFFISQLSLMDVMYISVTVPKMLMDQVMGVNKISAPECGMQMFLYLTLAGSEFFLLAAMAYDRYVAICHPLRYPVLMNHRVCLLLASGCWFLGSVDGFMLTPITMTFPFCRSREIHHFFCEVPAVMKLSCSDTSLYETLMYLCCVLMLLIPVTVISSSYSFILLTIHRMNSAEGRKKAFATCSSHMTVVILFYGAAVYTYMLPSSYHTPEKDMMVSVFYTILTPVLNPLIYSLRNKDVTGALKKMLNVGSVFQETIK

SEQ ID NO: 167 - protein, 315 aa, Artificial Sequence
  OR2T6 consensus-c
MDGNNETLSSDFTLMGLFTHNKASGFLFSVICAIFFMAMIANGVMIFLIHIDPHLHTPMYFLLSHLSFIDMMYISTIVPKMLVDYLVGKGTISFIACTAQYFLYMGFVGAEFFLLGLMAYDRYVAICNPLRYPVLMSWRVCWMILASSWFGGALDSFLLTPITMSLPFCASHKINHFFCEAPTMLRLACGDKAAYEMVMYVCCVAMLLIPFSVVIASYARILITVHQMKSAEGKKKAFATCSSHMMVVTLFYGAALYTYMLPQSYHTPIKDKVFSAFYTILTPLLNPLIYSLRNRDVMGALKRVLARGACGVTRE

SEQ ID NO: 168 - protein, 317 aa, Artificial Sequence
  OR2T7 consensus-d
MEWGNYSMYADFVLLGLFSNTRFPWLLFALILLVFVISIASNTVMIILIHIDSRLHTPMYFLLSQLSLMDILYISTIVPKMLVDQVMGQRAISFAGCTAQHFLYLTLAGAEFFLLGLMSYDRYVAICNPLRYPVLMSRKVCLLIVAAAWLGGSIDGFLLTPVTMQFPFCASREINHFFCEVPALLKLSCTDTSAYETAMYVCCIMMLLIPFSVISASYTRILITVYRMSEAEGRRKAVATCSSHMVVVSLFYGAAMYTYVLPHSYHTPEQDKAVSAFYTILTPMLNPLIYSLRNKDVTGALQKALGRCVSSGKVTTF

SEQ ID NO: 169 - protein, 312 aa, Artificial Sequence
  OR2T8 consensus-c
MENGNYTSDFILLGLFNHTRAHLFLFVMVLTIVFTSLFGNALMILLIHQDHRLHTPMYFLLSQLSLMDMMLVSTIVPKMAADYLTGSKSISPAGCGLQIFFFLTLGGGECFLLAAMSYDRYVAVCHPLRYPTLMSWQLCLRMTLGSWFLGAADGLMQAAATLSFPFCGAHEIDHFFCEAPTLVRLACADTSVFEYVMYICCVLMLLVPFSLILSSYSLILAAVLHMRSTEARKKAFATCSSHLAVVGLFYGAAIFTYMRPKSYRSANHDKVVSAFYTIFTPLLNPLIYSLRNSEVKGALRKCMGQCVALSHE

SEQ ID NO: 170 - protein, 320 aa, Artificial Sequence
  OR2T12 consensus-c
MEMRNTTSDFILLGLFNHTRAHLFLFMMVLATALTSLFGNALMILLIHLDHRLHRPMYFLLSQLSLMDMMLVSTIVPKMAADYLTGNKAISRAGCGLQIFFLLTLGGGECFLLAAMSYDRYVAVCHPLRYPVLMSWQLCLRMTLGSWFLGAADGLMQAAATLSFPFCGAHEIDHFFCEAPVLVRLACADTSVFENAMYICCVLMLLVPFSLILSSYGLILAAVLLMRSTEARKKAFATCSSHLAVVGLFYGAAIFTYMRPKSYRSANHDKVVSAFYTIFTPVLNPLIYSLRNSEVKEALKKWLGTCVNLKHQQNEAHRSR

SEQ ID NO: 171 - protein, 317 aa, Artificial Sequence; identical to SEQ ID NO: 168
  OR2T27 consensus-c

SEQ ID NO: 172 - protein, 320 aa, Artificial Sequence
  OR2T29 consensus-c
MANITWMANHTGRSDFILVGLFSQSKHPALLCVVIFVVFLMALSGNAILILLIHSDAHLHTPMYFFISQLSLMDVMYISVTVPKMLMDQVMGVNKISAPECGMQMFLYLTLAGSEFFLLAAMAYDRYVAICHPLRYPVLMNHRVCLLLVSGCWFLGSVDGFMLTPITMTFPFCRSREIHHFFCEVPAVMKLSCSDTSLYETLMYLCCVLMLLIPVTVISSSYSFILLTIHRMNSAEGRKKAFATCSSHMTVVILFYGAAVYTYMLPSSYHTPEKDMMVSVFYTILTPVLNPLIYSLRNKDVTGALKKMLNVGSVFQETIK

SEQ ID NO: 173 - protein, 320 aa, Artificial Sequence
  OR2T33 consensus-c
MEMRNTTSDFILLGLFNHTRAHLFLFMMVLTIALTSLFGNALMILLIHWDHRLHTPMYFLLSQLSLMDMMLVSTIVPKMAADYLTGSKSISPAGCGLQIFFLLTLGGGECFLLAAMSYDRYVAVCHPLRYPTLMSWQLCLRMTMGSWFLGAADGLMQAAATLSFPFCGAHEIDHFFCEAPVLVRLACADTSVFENVMYICCVLMLLVPFSLILSSYSLILAAVLHMRSTEARKKAFATCSSHLAVVGLFYGAAIFIYMRPKSYRSANHDKVVSAFYTIFTPLLNPLIYSLRNSEVKGALKRWLGTCVNIKHQQNEAHRSR

SEQ ID NO: 174 - protein, 322 aa, Artificial Sequence
  OR2T34 consensus-c
MCSGNQTSQNQTATDFILVGLFGETKHAALLYTVTFIFFLMALAGNALLILLIHSEPRLHTPMYFFISQLSLMDLMYISVTVPKMLVGQVTGDDTISPSGCGIQMFFYLTLAGAEVFLLAAMAYDRYAAICRPLHYPLLMNQRVCQLLVSGCWFLGMVDGLLLTPITMSFPFCQSRKILSFFCEAPALLKLSCSDISLYKMLMYLCCVLMLLIPIMVISSSYALILHLIHRMNSAEGRRKAFATCSSHMIVVLLFFGASIYTYMLPSSYHTAEQDMMVSAFYTIITPVLNPLIYSLRNKDVTGALRSMMQSGMNLRKVVKGK

SEQ ID NO: 175 - protein, 322 aa, Artificial Sequence
  OR2T35 consensus-c
MEGLLQNSTDFILLGLITHPAFPGLIFAVVFSIFVVAVTANVVMILLIHVDSRLHTPMYFLLSQLSIMDTVYICITVPKMLQDLLSKEKTISFLGCALQIFLYLTLIGGEFFLLGLMAYDRYVAVCNPLRYPLLMNRRICLFMVVGSWVGGSLDGFMLTPVTMSFPYCGSREINHFFCEIPAVLKLSCTDTSLYETLMYACCVLMLLIPISVISVSYTRILLTVHRMNSAEGRRKAFATCSSHIMVVSIFYGAAFYTNVLPHSYHTPEKDKVVSAFYTILTPMLNPLIYSLRNKDVAAALRKVLGRCGSSQRIRVATVIRKG

SEQ ID NO: 176 - protein, 306 aa, Artificial Sequence
  OR2AK2 consensus-c
MKTGNQSFGTDFLLVGLFQYGWMDSLLFVVIAILFTVALTGNIMLIHLIRLDTRLHTPMYFLLSQLSIIDMMYISTTVPKMAVNFLSQSKTITFLGCEIQTFVFLALGGTEALLLGFMSYDRYVAICHPLHYPVLMSKKICCLMVTCAWASSSINALIHTLYVFQLPFCRSRLINHFFCEVPSLLPLVCQDTSQYEYTVLLSGLIILLLPFLAILASYARVLIVVFQMSSGKGQAKAVSTCSSHLIVASLFYATTLSTYTRPHSLHSPSRDKVVAVFYTIITPLLNPFIYSLRNKEVTGAVRRLLG

SEQ ID NO: 177 - protein, 311 aa, Artificial Sequence
  OR4D10 consensus-c
MEMKNCTRVKEFIFLGLTQNQEVSLVLFLFLLLVYVTTLLGNLLIMVTVTCESRLHTPMYFLLRNLSIADICFSSITAPKVLVDLLSERKTISFNGCFTQMFFFHLIGGVDVFSLSVMALDRYVAISKPLHYVTIMSRGRCIGLIVASWVGGFVHSIVQISLLLPLPFCGPNVLDTFYCDVPQVLKLACTDIFILELLMISNNGLLTTLWFFLLLVSYMVILSLLRSQAGEGRRKAISTCTSHITVVTLHFVPCIYVYARPFTALPTDKAISVTFTVISPLLNPLIYTLRNQEMKSAMRRLKRRLVPSDRK

SEQ ID NO: 178 - protein, 312 aa, Artificial Sequence
  OR4E2 consensus-c
MDSLNQTRVTEFVFLGLTDNWVLEILFFMAFSAIYVLTLLGNILIIVTIVFTPRLHTPMYFFLSNLSFIDICHSSVTVPKMLEGLLLERKTISFDNCIAQLFFLHLFACAEIFLLTIMAYDRYVAICTPLHYPNVMNMRVCVQLVFALWLGGTVHSLVQTFLTIRLPYCGPNIIDSYFCDVPPVIKLACTDTYLTGMLIVSNSGTISLTCFLALVTSYTVILVSLRKQSAEGRRKALSTCSAHFMVVALFFGPCIFIYTRPDTSFSIDKVVSVFYTVVTPLLNPLIYTLRNEEVKSAMKQLRQRQVFFTKSY

SEQ ID NO: 179 - protein, 305 aa, Artificial Sequence
  OR4F5 consensus-d
MVTEFIFLGLSDSQELQIFLFVFFFVFYVGIVFGNLLIVITVVSDSHLHSPMYFLLANLSLIDLCLSSVTAPKMIADFFSKRKVISFKGCLAQIFLLHFFGGSELVILIAMAFDRYVAICKPLHYTTIMCGNVCVGIVAAAWGIGFLHSVSQLAFAVNLPFCGPNEVDSFYCDLPRVIKLACTDTYRLDIMVIANSGVLTVCSFVLLIISYTIILMTIQHRPSDRSSKALSTLTAHITVVLLFFGPCIFIYAWPFPIKSLDKFLAVFYSVVTPLLNPIIYTLRNKDMKTAMRRLRKWNANSSVKS

SEQ ID NO: 180 - protein, 311 aa, Artificial Sequence
  OR4K1 consensus-c
MAHTNESVVSEFVLLGLSNSWELQLFFFAIFSIVYVTSVLGNIMIIVIISSDSHLNSPMYFLLSNLSFIDICQSNFATPKMLVDFFVEHKTISFEGCMAQIFLLHSFVGSEMMLLVAMAYDRFIAICKPLHYSTIMNRRLCIIFVSISWAVGILHSVSHLAFTVDLPFCGPNEVDSFFCDLPLVIELACMDTYEMEIMTLTNSGLISLSCFLALIISYTIILITVRRRSSSGSSKALSTLTAHITVVILFFGPCIYFYIWPFSRLSVDKFLSVFYTVCTPLLNPIIYSLRNEDVKSAMRKLRNRHVNSWKN

SEQ ID NO: 181 - protein, 313 aa, Artificial Sequence
  OR4K2 consensus-c
MDVGNKSTVSEFVLLGLSNSWELQMFFFMVFSLFYVATMVGNSLIVITVIVDSHLHSPMYFLLTNLSIIDMSLASFATPKMITDYLTGHKTISFDGCITQIFFLHLFTGTEIILLMAMSFDRYIAICKPLHYASIISPQVCVALVVASWIVGVMHSMSQVIFALTLPFCGPNEVDSFFCDLPVVFQLACVDTYVLGLFMISTSGIIALSCFILLFNSYVIVLVTIKHHSSRGSSKALSTCTAHFIVVFMFFGPCIFIYMWPLSSFLVDKILSVFYTIFTPILNPIIYTLRNQEVKTAMRKLKNRFLNFNKAMP

SEQ ID NO: 182 - protein, 323 aa, Artificial Sequence
  OR4K5 consensus-c
MDKSNSSVVSEFVLLGLSSSQELQLFFFVFFSVLYVVIVLGNLLIILTVTSDTSLHSPMYFLLGNLSFVDICQASFATPKMIADFLSEHKTISFSGCIAQIFFIHLFTGGEMVLLVSMAYDRYVAICKPLHYVVIMSRRTCTVLVMISWAVGLVHTLSQLSFTVNLPFCGPNVVDSFFCDLPRVTKLACLDSYIIEILIVVNSGILSLSTFSLLVSSYIIILVTVWFKSSAAMAKAFSTLAAHITVVILFFGPCIFIYVWPFTTYPVDKFLAIFYTVFTPILNPIIYTLRNRDMKAAMRKIVTHYLRPKKISEMPLVVRTSLY

SEQ ID NO: 183 - protein, 315 aa, Artificial Sequence
  OR4K17 consensus-c
MESMELLNQSQVSEFILLGLTSSQDIQFLLFALFSVIYVVTVLGNLLIVVTVFNTPNLNTPMYFLLGNLSFVDMTLASFATPKMILNLVKKQKTISFAGCFTQIFLLHLLGGVEMVLLVSMAYDRYVAICKPLHYMTIMNKKVCVLLVVTSWLLGLLHSGLQIPFVVNLPFCGPNVVDSIFCDLPLVTKLACIDTYFVQIVIVANSGMISLSCFIILLISYSLILITIRNHSSTGQSKARSTLTAHITVVILFFGPCIFIYIWPFSNHSVDKFLAVFYTIITPILNPIIYTLRNKEMKTAMKKLWRAFVNSREDT

SEQ ID NO: 184 - protein, 312 aa, Artificial Sequence
  OR4L1 consensus-c
MDLKNGSLVTEFILLGFSGRWELQIFFFVTFSLIYGATVMGNILIMVTVTFSSTLHSPMYFLLGNLSFLDMCLSTVTTPKMITDLLTEHKTISVWGCMAQMFFMHFFGGAEMTLLIIMAFDRYVAICKPLHYRTIMSHRLLKGFVILSWIIGFIHTMSQMVLTVNLPFCGPNVIDNIFCDLPLVIKLACIETYTLELFVIADSGLLSFICFILLLVSYTVILVTVPKRSSGGLSKALSTLSAHIIVVTLFFGPCIFIYAWPFSSFASNKTLAVFYTVITPLLNPIIYTLRNQKMQEAMRKLRFQYVSSAQNF

SEQ ID NO: 185 - protein, 313 aa, Artificial Sequence
  OR4M1 consensus-c
MEPANYTRVTEFVLTGLSQTREVQLVLFVIFLSFYLFILPGNILIICTIRLDPHLTSPMYFLLANLAFLDIWYSSITAPKMLVDFFVERKIISFGGCIAQLFFLHFVGASEMFLLTVMAFDRYAAICRPLHYATIMNRRLCCILVALSWMGGFIHSIIQVALIVRLPFCGPNELDSYFCDITQVVRIACANTFPEELVMIFSSGLISVVCFIALLMSYAFLLAMLKKHSGSGESTSRAMSTCYSHITIVVLMFGPSIYIYARPFDSFSLDKVVSVFHTVIFPLLNPIIYTLRNKEVKTAMRKLVNRYILCKEK

SEQ ID NO: 186 - protein, 307 aa, Artificial Sequence
  OR4N2 consensus-c
MESENSTVVTEFILLGLTQSRDIQLLVFVLVLIFYLIILPGNFLIILTIRSDPGLTAPLYFFLGNLAFLDASYSFIVAPRMLVDFLSEKKVISYRGCITQLFFLHFLGGGEGLLLVVMAFDRYIAICRPLHYSTVMNPRACYALLLALWLGGFVHSIIQVALILRLPFCGPNQLDNFFCDVPQVIKLACTDTFVVELLMVFNSGLMTLLCFLGLLASYAVILCRVRGSSSEGKSKAMSTCTTHIIVIFLMFGPGIFIYTRPFRAFPADKVVSLFHTVIFPLLNPVIYTLRNQEVKASMKRLFNQHIA

SEQ ID NO: 187 - protein, 308 aa, Artificial Sequence
  OR4N5 consensus-c
METENSTVVTEFILLGLTQSQDAQLLVFVLVLIFYLIILPGNFLIILTIRSDPGLTAPLYFFLGNLAFLDASYSFIVAPRMLVDFLSEKKVISYRGCITQLFFLHFLGAGEMFLLVVMAFDRYIAICRPLHYSTVMNPRACYALLLALWLGGFIHSIVQVALILHLPFCGPNQLDNFFCDVPQVIKLACTDTFVVELLMVSNSGLLTLLCFLGLLASYAVILCRVKGHSSEGKSKAISTCTTHIIIVFLMFGPAIFIYTRPFRAFPADKVVSLFHTVIFPLMNPVIYTLRNQEVKASMRKLLSQHMVC

SEQ ID NO: 188 - protein, 315 aa, Artificial Sequence
  OR5A1 consensus-c
MSITKAWNSSSVTMFILLGFTDHPELQALLFVTFLGIYLVTLAWNLALIFLIRGDTHLHTPMYFFLSNLSFIDICYSSAVAPKMLTDFFWEQKTISFVGCAAQFFFFVGMGLTECFLLTAMAYDRYAAISSPLLYTAIMSQGLCTRMVVGAYVGGFLSSLIQASSIFRLHFCGPNVINHFFCDLPPVLALSCSDTFLSQVVNFLVVVTVGGTSFLILLISYGYIVAAVLKIPSAEGRWKAFNTCASHLMVVTLLFGTALFMYLRPSSSYSLGRDKVVSVFYSLVIPMLNPLIYSLRNKEIKDALWKVLEKKKVFS

SEQ ID NO: 189 - protein, 308 aa, Artificial Sequence
  OR6F1 consensus-c
MDTGNKTLPQDFILLGFPGSQTLQLSLFMLFLVMYILTVSGNVAIIMLVSTSHQLHTPMYFFLCNLSFLEIWYTTAAVPKALAILLGRSQTISFTGCLLQMYFVFSLGCTEYFLLAAMAYDRYLAICYPLHYGAIMSSLLSAQLALGSWVCGFLAIAVPAALISGLSFCGPRAINHFFCDIAPWIALACTNTQAVELVAFVIAFVVILGSCLITLVSYIYIISTILRIPSASGRSKAFSTCSSHLTVVLIWYGSTIFLHVRTSIKDSLDLTKAVHVLNTVVTPVLNPFIYTLRNKEVRETLLKKWKGK

SEQ ID NO: 190 - protein, 327 aa, Artificial Sequence
  OR6J1 consensus-c
MGNWTAAVTEFILLGFSLSREVELLLLVLLLPTFLLTLLGNLLIISIVLSCSRLHTPMYFFLCNLSILDILFTSVISPKVLANLGSGDKTISFAGCITQCYFYFFLGTVEFLLLTVMSYDRYAAICCPLRYTTIMRPSVCIGTVVFSWVGGFLSVLFPTILISQLPFCGSNIINHFFCDSGPLLALACADTTAIELMDFMLSSMVILCCIVLVAYSYTYIILTIVRIPSASGRKKAFNTCASHLTIVIISSGITVFIYVTPSQKEYLEINKIPSVLSSVVTPFLNPFIYTLRNDTVQGVLRDVWVRVRGVLEKRAVLRSRLSSNKDH

SEQ ID NO: 191 - protein, 309 aa, Artificial Sequence
  OR7A10 consensus-c
MKSWNNTIISEFLLLGLSEEPELQPFLFGLFLSMYLVTVLGNLLIILATISDSHLHTPMYFFLSNLSFVDICFTSTTVPKMLVNIQTQSKVITYAGCITQMYFFLLFVGLDNFLLTVMAYDRFVAICHPLHYMVIMNPRLCGLLVLASWIMSVLNSLLQSLMVLPLSFCTHLEIPHFFCELNQVVHLACSDTFLNDIVMYFAVVLLGGGPLTGILYSYSKIVSSIRAISSAQGKYKAFSTCASHLSVVSLFYGTCLGVYLSSAATHNSHSSAAASVMYTVVTPMLNPFIYSLRNKDIKGALKRFFRGKQ

SEQ ID NO: 192 - protein, 320 aa, Artificial Sequence
  OR7C2 consensus-c
MERGNQTGVGNFLLLGFTEDPDLQLLLFGLFLSMYLVTITGNLLIILAIISDSHLHTPMYFFLSNLSFADICFTSTTIPKMLVNIQTQSKMITFAGCLSQIFFFIVFGCLDNLLLTVMAYDRFVAICHPLHYTVIMNPRLCGLLALGSWCISVMGSLLETLTILRLSFCTNMEIPHFFCDLPEVLKLACSDTLINNIVVYFVTIVLGVFPLSGILFSYSQIFSSILRISSARGKYKAFSTCGSHLSVVSLFYGTGLGVYLSSAATPSSRTSLAASVMYTMVTPMLNPFIYSLRNRDMKGALGRLLLRATSLKEGTIAKLS

SEQ ID NO: 193 - protein, 312 aa, Artificial Sequence
  OR7G2 consensus-c
MEPRNQTAVSEFLLLGLTEDPELQPLLFSLFLSMYLVTILGNLLIILAVSSDSHLHTPMYFFLSNLSFTDICLSTTTIPKMLVNIQAQNQSITYTGCLTQICFVLFFAGLENFLLAAMAYDRYVAICHPLRYTVIMNPRLCGLLILLSLLISVVNALLHSLMVLRLSFCTDLEIPHFFCELAQVIKLACSDTLINNILIYFAACIFGGIPLSGIIFSYTQIVSSVLRMPSAGGKYKAFSTCGSHLSVVSLFYGTGLGVYISSAVTDSSRKTAVASVMYSVVPQMMNPFIYSLRNRDMKGALRKLIGRIPSLL

SEQ ID NO: 194 - protein, 312 aa, Artificial Sequence
  OR7G3 consensus-c
MKAGNFSDTPEFLLLGLSEDPELQPLLFMLFLSMYLVTVLGNLLIILAINSDSHLHTPMYFFLSNLSFVDICFTTTTIPKMLVNIQTQSKSISYTGCLTQICFVLVFAGLENGILVMMAYDRFVAICHPLRYNVIMNPKLCGLLVLLSFLISVLDALLHTLMALRLSFCTDLEIPHFFCELAHILKLACSDILINNILVYLVTSLLGVVPLSGIIFSYTRIVSSVLKIPSAGGKYKAFSICGSHLIVVSLFYGTGFGVYLSSAATHSSRKSAIASVMYTVVTPMMNPFIYSLRNKDMLGALRKLISRIPSFH

SEQ ID NO: 195 - protein, 318 aa, Artificial Sequence
  OR10G2 consensus-c
MGKTKNTSLDTVVTDFILLGLSHPPNLRTLLFLVFFIIYILTQLGNLLILLTVWADPKLHARPMYILLGVLSFLDMWLSSVIVPRLILNFTPASKAIPFGGCVAQLYFFHFLGSTQCFLYTLMAYDRYLAICQPLRYPVLMNGRLCTILVAGAWVAGSIHGSIQATLTFRLPYCGPNQVDYFICDIPAVLRLACADTTVNELVTFVDIGVVAASCFMLILLSYANIVHAILKIRTADGRRRAFSTCGSHLTVVTVYYVPCIFIYLRAGSKSPLDGAVAVFYTVVTPLLNPLIYTLRNQEVKSALKRITAGRGAASENK

SEQ ID NO: 196 - protein, 309 aa, Artificial Sequence
  OR10J1 consensus-c
MKRENHTLVTEFVFQGFSSFHEHQLTLFVVFLALYILTLAGNVIIVTIISIDRHLHTPMYFFLSMLSTSETVYTLVILPRMLSSLVGLSQPISLAGCATQMFFFITLAINNCFLLTAMGYDRYVAICNPLRYMVIMNKRVCIQLVWGACSIGLIVAITQVSSVFRLPFCARKVAHFFCDIRPVMKLSCIDTTVNEILTLIISVLVIVVPMGLVFISYILIISTILKIASAEGRKKAFATCASHLTVVIVHYGCASIAYLKPKSENTRDQDQLISVTYTVITPLLNPVVYTLRNKEVKDALCRAIGGKFS

SEQ ID NO: 197 - protein, 313 aa, Artificial Sequence
  OR10J3 consensus-c
MPKPNSTFVTEFLFEGFSSFGWQHRLVFFVVFLTLYLLTLSGNVIIVTIIRLDRHLHTPMYFFLSMLSISETCYTVAIIPRMLSGLLNPHQPIATQGCATQLFFYLTFGINNCFLLTAMGYDRYVAICNPLRYSVIMGKRACVQLASGSLGIGLGMAIVQVTSVFGLPFCDAFVISHFFCDVRPLLKLACTDTTVNEIINFVVSVCVLVLPMGLVFISYVLIISTILKIASAEGRKKAFATCASHLTVVIIHYGCASIIYLKPKSQSSLGQDRLISVTYTVITPLLNPVVYSLRNKEVKDALARARGAKPLSS

SEQ ID NO: 198 - protein, 313 aa, Artificial Sequence
  OR10K1 consensus-c
MEQVNETLVREFVFLGFSSLAGLQQLLFVVFLLLYLFTLGTNAIIISTIVLDRALHTPMYFFLAVLSCSETCYTFVIVPKMLVDLLAQKKTISFLGCAIQMFSFLFLGCSHSFLLAAMGYDRYVAICNPLRYTVLMGHGVCVGLVAAACACGFTVSLVTTSLVFHLPFHSSNQLHHFFCDISPVLKLASHHSRLSQLVIFMLGVFVLVIPLLLILVSYIRIISAILKIPSSVGRYKAFSTCASHLIVVTVHYGCASFIYLRPKSNYSSSQDTLISVSYTILTPLFNPMIYSLRNKEFKSALRRTMGQTSYPLN

SEQ ID NO: 199 - protein, 314 aa, Artificial Sequence
  OR10K2 consensus-c
MERVNETLVREFVFLGFSSLAGLQQLLFVVFLLLYLFTLGTNAIIISTIVLDRALHTPMYFFLAVLSCSETCYTFVIVPKMLVDLLAQKKTISFLGCAIQMFTFLFLGCSHSFLLAAMGYDRYVAICNPLRYTVLMGHGVCVGLVAAACACGFTVAQIITSLVFHLPFHSSNQLHHFFCDISPVLKVASHHTHFSQIVIFMLCALVLVIPLLLILVSYIHIISAILQFPSTLGRYKAFSTCASHLIVVTVHYGCASFIYLRPKSNYSSSQDALISVSYTILTPLFNPMIYSLRNKEFKSALCRVVGRTISLPQH

SEQ ID NO: 200 - protein, 314 aa, Artificial Sequence
  OR10T2 consensus-c
MRGFNTTVVTQFILVGFSSLGELQLLLFVIFLLLYLTILVANATIMTVIRLSRTLHTPMYGFLFILSFSETCYTLVIIPQLLVHLLSDTKTISFMACATQLFFFLGFACTNCFLIAVMGYDRYVAICHPLRYTLIMNKRLGLGLVSLSGATGFLIALVATNLICDMPFCGPNRVNHYFCDMAPVIKLACTDTHVKELALFSLSILVIMVPFLLILISYGFIVNTILKIPSAEGKRKAFATCASHLTVVFVHYGCASIIYLRPKSKSASDKDQLVAVTYTVVTPLLNPLVYSLRNKEVKTALKRVLGMPVATKMS

SEQ ID NO: 201 - protein, 310 aa, Artificial Sequence
  OR10X1 consensus-c
MKINQTILKEFILVGFSVYPHVQTFLFVVFFCLYLLTLAGNLAIMGLTWVDRSLHTPMYLFLSALSFSETCYTLTIIPKMLEDLLAKDRSISVIGCGLQMCFFLGLGGTNCIILTLMGYDRFLAICNPLRYPLLMTNIVCGQLVASAWAGGFFISLTETALIFRGSFCRPNLVKHFFCHMRAVVRLSCIDSDLTEFIVTLISVSGLLGTFLLIILTYVFILSTVLRIPSAEGKQKAFSTCASHLTVVIIHFGFASIVYLKPEASGGDDTLIAVPYTVITPFLSPLIFSLRNKDMKNAFRKMLGKTVALKK

SEQ ID NO: 202 - protein, 311 aa, Artificial Sequence
  OR11G2 consensus-c
MKISNTPNNSSTITGFILLGFPCPREGQILLFVLFSVVYLLTLMGNGSIICAVRWDQRLHTPMYILLANFSFLEIWYVTSTVPNMLANFLSDTKVISFSGCFLQFYFFFSLGSTECFFLAVMAFDRYLAICRPLHYPTIMTGRLCTNLVVSCWVLGFLWFLIPIIIISQMSFCGSRIIDHFLCDPGPLLALTCKKAPVIELVFSTLSPLPLFIPFLFIMGSYALVLRAVLKVPSAAGRRKAFSTCGSHLAVVSLFYGSVLVMYGSPTSEHEAGMQKIVTLFYSVVTPLLNPVIYSLRNKDMKKALKKFLGT

SEQ ID NO: 203 - protein, 329 aa, Artificial Sequence
  OR11H6 consensus-c
MFFIIHSLVSVFLTALGPQNRTMHFVTEFVLLGFHGQREMQSFFFSLILVLYLLTLLGNGAIVCAVKWDRRLHTPMYILLGNFAFLEIWYVSSTVPNMLVNILSETKTISFSGCFLQFYFFFSLGTTECFFLSVMAYDRYLAICRPLHYPSIMTGKFCVILVCVCWVSGFLCYPVPIVLISQLPFCGPNIIDHFVCDPGPLFALACIPAPSTELICYTFNSMIIFGPFLSILGSYTLVLRAVLRVPSGAGRTKAFSTCGSHLMVVSLFYGTLMVMYVSPTSGNPAGMQKIITLVYSAVTPLLNPLIYSLRNKDMKDALKKVLGLTVSQN

SEQ ID NO: 204 - protein, 314 aa, Artificial Sequence
  OR11H7 consensus-c
MNKSQISTVTQFVLLGFPGPWKIQIILFSMILLVYILTLTGNMAIICAVRWDHRLHTPMYMLLANFSFLEIWYVTCTVPNMLVNFLSKTKTISFSGCFTQFYFFFSLGTTECFFLCVMAYDRYLAICHPLHYPSIMTGQLCGILVSLCWLIGFLGHSIPIFFISQLPFCGPNIIDHFLCDVDPLMALSCAPTPIIGHVFHSVSSLIIILTILYILGSYTLVLRAVLQVPSSAGRQKAFSTCGSHLVVVSLFYGTIMVMYVSPTSGNSVAMHKIITLIYSVVTPVLNPLIYSLRNKDMKYALHHVFCGMRIIQRS

SEQ ID NO: 205 - protein, 314 aa, Artificial Sequence
  OR11L1 consensus-c
MEPQNTSTVTEFQLLGFQNLLEWQALLFVIFLLIYCLTITGNVVIITVVSQDLRLHSPMYMFLKHLSFLEIWYTSTIVPLLLANLLSWGQAISFSACMAQLYFFVFFGATECFLLAFMAYDRYLAICSPLHYSFLMSPENCTALVAVSWVTGVGTGFLPSLMISKLDFCGPNQINHFFCDLPPLMQLSCSSVYVTEMAIFILSIAVLCICFLLTLVSYVFIVSSILRIPSASGRLKTFSTCGSHLAVVTIYYGTMISMYVRPNAHLSPETNKIISVFYTVVTPLLNPVIYSLRNKDFKEAVRKIMRRKCGVYRA

SEQ ID NO: 206 - protein, 314 aa, Artificial Sequence
  OR14A2 consensus-c
MANVTLVTGFLLMGFSDIQELQTLCGVLFLVIYLAALMSNLLIITLITLDLKLQTPMYFFLKNLSLLDVFLVSVPIPKFIVNSLTHNNSISILGCAFQLLLMTSFSAGEIFVLTAMSYDRYVAICCPLHYEVIMNTGVCVLMAGVSWAVGGLFGAAYTAGTFSMPFCGSNVIPQFFCDVPSLLRISCSETLMVIYASIGIGACLGISCFICIVISYIYIFSTVLKIPTTKGQSKAFSTCFPHLTVFTVFIITACFVYLKPPSNSPSVIDRLLSVIYTVLPPVLNPVIYSLRNNDMKCALIRLLQKTYGQEAYFI

SEQ ID NO: 207 - protein, 308 aa, Artificial Sequence
  OR14A16 consensus-c
MNNLTVTEFILMGFSTNKNMQILHSVLFLLIYLCALMGNVLIIMITTLDHHLHTPMYFFLKNLSFLDLCLISVTVPKSIANSLIHNNSISFLGCVSQVFLLLSSASTELLLLTVMSFDRYAAICHPLHYEVIMDRSTCVQMAAVSWLSGGLIAVMHTAGTFSLSYCGSNMVHQFFCDIPQLLAISCSENLIREIVLILISVVLDFCCFVIIISYVHIFSTVKKIPSTEGQSKAYSTCLPHLLVVVLFLSTGFFAYLKPASESPSILDLLISVFYTVVPPTFNPIIYSLRNKAMKVALGMLIKGKLTKK

SEQ ID NO: 208 - protein, 312 aa, Artificial Sequence
  OR14C36 consensus-c
MPNSTTVTEFLLMRFSDVWELRILHAALFLLMYLATLMGNLLIVTVTTCDSSLHTPMYFFLRNLSILDACYISVTVPTACVNSLLDSTTISKAGCAAQVFLVVFFAYVELLFLTIMAHDRYVAICQPLHYPVIMNSRICVQMTLASLLSGLVYAGMHTGNTFRLPFCQSNVVHQFFCDIPSLLKLSCSDTFSNEVMIVVSALGVGGGCFIFIIRSYIHIFSTVLKFPRGAERTKAFSTCVPHILVVSVFLSSCSSVYLRPPAISATIQDMILSVFYSIVPPFLNPIIYSLRNKQIKEAIKKIMKRIFYSENV

SEQ ID NO: 209 - protein, 313 aa, Artificial Sequence
  OR14K1 consensus-c
MNQTQMMEFLLVRFTENWVLLRLHALLFSLIYLVAVLENLVIILLTILDHRLHTPMYFFLRHLSFLDLCLISATVPKSILNSVTSTDSISFLGCVLQLFLVVLLAGSEIGILTAMSYDRYVAICCPLHYEAVMSRGLCVQLMALSWLNGGALGLLYSAGTFSLNFCGSDEIHQFFCDVPALLKLTCSKEHATISVSVAIGVCYAFSCLVCIVVSYVYIFSTVLRIPSRQRQSKAFSTCVPHLIVVTTFLVTGAVAYLKPGSDAPSLLDLLVSVFYSVAPPTLNPVIYCLRNKDIKSALSKVLWNVRSSGVMKR

SEQ ID NO: 210 - protein, 309 aa, Artificial Sequence
  OR7E24 consensus-c
MEPQNLTGVSEFLLLGLSEDPELQPVLAGLFLSMYLVTVLGNLLIILAVSSDSHLHTPMYFFLSNLSLADIGFTSTTVPKMIVDIQTHSRVISYEGCLTQMSFFVLFACMDDMLLSVMAYDRFVAICHPLHYRVIMNPRLCGFLVLVSFFISLLDSQLHNLIVLQLTCFKDVEISNFFCDPSQLLHLACSDTFINNIVIYFMGAIFGFLPISGILFSYYKIVSSILRVPSSGGKYKAFSTCGSHLAVVCLFYGTGLGGYLSSAVSPSPRKSMVASVMYTVVTPMLNPFIYSLRNRDIKSALCRLHSRII

SEQ ID NO: 211 - DNA, 933 bp, Artificial Sequence
  OR2A25 consensus-a
atgggcggcaaccagaccagcatcacagagttcctgctgctgggatttccagtgggacctcggatccagatgctgctgttcggcctgttttccctgttctacatctttaccctgctgggcaatggcacaatcctgggcctgatctctctggacagcagactgcacacccctatgtacttctttctgtcccacctggccgtggtggatatcgcctatgcctgtaacacagtgccacagatgctggtgaatctgctgcacccagccaagcccatctccttcgccggctgtatgacccagatgttcctgtttctgtcttttgcccacacagagtgcctgctgctggtggtcatgagctacgacagatatgtggccatctgtcaccccctgaggtattccaccatcatgacatggcgcgtgtgcatcaccctggccctgacatcttggatcctgggcgtgctgctggccctggtgcacctggtgctgctgctgccactgtctttctgcggcccccagaaggtgaaccacttcttttgtgagatcatggccgtgctgaagctggcctgcgccgatacccacatcaatgaagtgatggtgctggcaggagccgtgagcgtgctggtgggacctttcttttccatcgtgatctcttacgtgcacatcctgtgcgccatcctgaagatccagagcggcgagggcaggcagaaggccttctccatctgcagctcccacctgtgcgtggtgggcctgttttatggcaccgccatcatcatgtacgtggagccccagtatgagtcccctaaggagcagaagaagtacctgctgctgttccactctctgtttaaccctatgctgaatccactgatctatagcctgcgcaacaaggaggtgcagggcaccctgaagcggatgctggagaaggagagaacatcttga

SEQ ID NO: 212 - DNA, 933 bp, Artificial Sequence
  OR2A25 consensus-b
atgggcggcaaccagacctctatcacagagttcctgctgctgggatttccagtgggaccacggatccagatgctgctgttcggcctgtttagcctgttctacgtgtttaccctgctgggcaatggcacaatcctgggcctgatctccctggactctagactgcacacccctatgtacttctttctgtcccacctggccgtggtggatatcgcctatgcctgtaacacagtgccacagatgctggtgaatctgctgcaccctgccaagccaatcagcttcgccggctgtatgacccagacattcctgtttctgtcctttgcccacaccgagtgcctgctgctggtggtcatgtcttacgacagatatgtggccatctgtcaccccctgaggtatagcgccatcatgacctggcgcgtgtgcatcacactggccctgacctcctggacactgggcgtgctgctggccctgatccacctggtgctgctgctgccactgcctttctgcaggccccagaagatcaaccacttcttttgtgagatcatggccgtgctgaagctggcctgcgccgatacacacatcaatgaagtgatggtgctggcaggagcaatctccgtgctggtgggacctctgagctccatcgtggtgtcttacatgtgcatcctgtgcgccatcctgaagatccagtctggagagggacagaggaaggccttcagcacctgctctagccacctgtgcgtggtgggcctgttttatggcacagccatcatcatgtacgtgggcccacagtatggcaaccccaaggagcagaagaagtacctgctgctgttccacagcctgtttaaccccatgctgaatcctctgatctatagcctgcggaactccgaggtgaagaataccctgaagcggatgctggagaaggagagagccctgtga

SEQ ID NO: 213 - DNA, 933 bp, Artificial Sequence
  OR2A25 consensus-c
atgggcggcaaccagacctctgtgacagagttcatcctgctgggctttccactgggcccccggatccagatgctgctgttcggcctgtttagcctgttctacatctttaccctgctgggcaatggcacaatcctgggcctgatctccctggactctagactgcacacccctatgtacttctttctgtcccacctggccatcgtggatatcgcctatgcctgtaacacagtgccacagatgctggtgaatctgctgcaccctgccaagccaatctctttcgccggctgtatgacccagacattcctgtttctgagctttgcccacaccgagtgcctgctgctggtggtcatgtcctacgacagatatgtggccatctgtcaccccctgaggtatagcacaatcatgtcctggcgcgtgtgcatcaccctggccctgacaagctggatcctgggcgtgctgctggccctggtgcacctggtgctgctgctgccactgcctttctgcggaccccagaaggtgaaccacttcttttgtgagatcatcgccgtgctgaagctggcctgcgccgatacccacatcaatgaagtgatggtgctggcaggagccgtgtccgtgctggtgggaccttttagctccatcgtgatctcttacatccacatcctgtgcgccatcctgaagatccagtctggcgagggcaggcagaaggccttcagcacctgctctagccacctgtgcgtggtgggcctgttttatggcacagccatcatcatgtacgtgggcccacagtatggctcccccaaggagcagaagaagtacctgctgctgttccacagcctgtttaaccccatgctgaatcctctgatctattccctgcgcaacaaggaggtgaaggccgccctgaagcggatgctggagaaggagagaacctcttga

SEQ ID NO: 214 - DNA, 951 bp, Artificial Sequence
  OR2AG1 consensus-c
atggagctgtggaactctaccctgggcagcggcttcatcctggtgggcatcctgaatgactccggctctccagagctgctgtgcgccaccatcacagtgctgtacatgctggccctgacctctaacggcctgctgctgctggtcatcacaatggatgccaggctgcacgtgcctatgtatctgctgctgggccagctgtccctgatggacctgctgttcacctctgtggtgacaccaaaggccctggccgattttctgcggagagagaacaccatctccttcggcggctgcgccctgcagatgtttctggccctgacactgggaggagcagaggacctgctgctggccttcatggcctacgatcgctatgtggccatctgtcacccactgaattacatggtgctgatgcggcccagagtgtgctggctgatggtggccaccagctggatcctggcaagcctgtccgccctgatctacaccgtgtatacaatgcactatcccttttgcaaggccaggaagatccgccacctgctgtgcgagatcccacctctgctgaagctggcatgcgcagacacctcccggtacgagctgatggtgtatgtgatgggcgtgacattcctgatcccaccactggcagcaatcctggcatcttacaccctgatcctgtttacagtgctgcacatgcctagcaacgagggcagaaagaaggccctggtgacctgtagctcccacctgacagtggtgggcatgttctacggcgccgccacctttatgtatgtgctgccctctagcttccacagccctaagcaggataatatcatctccgtgttttacaccatcgtgacacctgccctgaacccactgatctattccctgcggaataaggaagtgatgggcgccctgaggcgcgtgctgggcaagtacatgctgcctgcccactctacactgtga

SEQ ID NO: 215 - DNA, 951 bp, Artificial Sequence
  OR2AG2 consensus-c
atggagctgtggaacagcaccctgggctccggcttcatcctggtgggcatcctgaatgactccggctctcccgagctgctgtgcgcaaccatcacagtgctgtacatgctggccctgacctctaacggcctgctgctgctggtcatcacaatcgatgccaggctgcacgtgcctatgtatctgctgctgggccagctgagcctgatggacctgctgttcacctccgtggtgacaccaaaggccctggccgattttctgcggagagagaacaccatctccttcggcggctgcgccctgcagatgtttctggccctgacactgggaggagcagaggacctgctgctggcctttatggcctacgatagatatgtggccatctgtcaccccctgaattacatggtgctgatgcggcctagagtgtgctggctgatggtggccacctcttggatcctggcaagcctgatcgccctgggacacaccatgtatacaatgcacttccctttttgcatgtcctgggagatcaggcacctgctgtgcgagatcccacctctgctgaagctggcatgcgcagacacatctcgctacgagctgatggtgtatgtgaccggcgtgacattcctgctgctgccactgtccgccatcgtggcctcttacaccctgatcctgtttacagtgctgcacatgcccagcaacgagggccggaagaaggccctggtgacctgtagctcccacctgacagtggtgggcatgttctacggcgccgccacctttatgtatgtgctgccttctagcttccactctccaaagcaggataatatcatcagcgtgttttacaccatcgtgacaccagccctgaaccccctgatctatagcctgagaaataaggaagtgatgggcgccctgaggcgcgtgctgggcaagtatatcctgctggcccactccacactgtga

SEQ ID NO: 216 - DNA, 948 bp, Artificial Sequence
  OR2D2 consensus-c
atgcggcagacaaaccagacccaggtgacagagttcctgctgctgggcctgagcgacgatcctcacacccagcagctgctgttcatcctgtttctgggcgtgtacctggtgacagtgctgggcaatctgctgctgatgtccctggtgcacgtggactctcagctgcacacccccatgtatttctttctgtgcaacctgtccctggccgacctgtgcttctctacaaatatcgtgcctcaggccctggtgcacctgctgagccggaagaaagtgatctcctttaccagatgcgccgcccagctgctgctgttcctgatctttggctgcacacagtgtgccctgctggccgtgatgagctacgacagatatgtggccatctgcaaccccctgcactacccttccatcatgacctggcgggtgtgcgtgcagctggcaaccggatcctggacatctggcatcctggtgtccgtggtggacaccacattcaccctgcggctgccttatagaggctctaatagcatcgcccacttcttttgcgaggcaccagccctgctgatcctggcatctaccgatacacacaccagcgagatggccatctttctgatgggcgtggtcatcctgctgatccccgtgtctctgatcctggtgagctacggcagaatcatcgtgaccgtggtgaggatgaagtccgccgtgggccgcctgaaggccttcagcacatgtggctcccacctgatggtggtcatcctgttctacggctctgccatcatcacctatatgacaccaaagagctccaaggagcaggagaagctggtgagcgtgttctacgccatggtgaccccaatgctgaaccccctgatctatagcctgagaaataaggatgtgaagggcgccctgaggaaggtggccacacgcaacttcccctgtcggctgggcatctttcactga

SEQ ID NO: 217 - DNA, 918 bp, Artificial Sequence
  OR2D3 consensus-c
atgggcgaggagaaccagaccagcgagttcatctttctgggcctgtcccaggaccctcagacacagatcctgctgttctttctgttcctgatcatctacctgctgaccgtgctgggcaacctgctgatcatcgtgctgatccacagcgactccaggctgcacacccctatgtatttctttctgcgcaatctgagcttcgccgatctgtgcttttctacaagcatcgtgccacaggtgctggtgcacttcctggtgaagcggaagaccatctcctttgccggctgttctacacagatcgtggtgtttctgctggtgggatgcaccgagtgtgcactgctggccgtgatgtcctacgatagatatgtggccgtgtgcaagcccctgcactactctaccatcatgacacagtgggtgtgcgtgcagctggcaatcggatcctgggcatctggcgccctggtgtccctggtggacaccacattcacatttcggctgccttacagaggccagaacatcatcaatcactatttctgcgagccacctgccctgctgaagctggcaagcgccgatacctactccacagagatggccatctttgccatgggcgtggtcatcctgctggccccagtgtctctgatcctggtgagctattggaatatcatctccaccgtgatccagatgcagtctggcgagggcaggctgaaggccttcagcacatgtggctcccacctgatcgtggtggtgctgttctacggctctggcatctttgcctatatgcggcccaacagcaagaccatgaatgagagagacaagatgatcagcgtgttctacagcgtggtgacaccaatgctgaaccccatcatctatagcctgcggaataaggatgtgaagggcgccctgaggaagctgaccctgaggtga

SEQ ID NO: 218 - DNA, 954 bp, Artificial Sequence
  OR2T11 consensus-a
atgaccaacaccacaagctcctctgacttcatcctgctgggactgctggtgaacagcgaggcaaccggcatcgtgttcacagtgatcctggccgtgtttgtggtggccgtgacagccaacctggtcatgatctttctgatccaggtggattctcggctgcacaccccaatgtacttcctgctgagccagctgtccatcatggacacactgtttatctgtaccacagtgcccaagctgctggtggatatggtgtctaaggagaagaccatcagcttcgtggcctgcggcatccagatctttctgtacctgacaatgatcggcagcgagttctttctgctgggcctgatggcctacgacagatatgtggccgtgtgcaaccccctgaggtatcctgtgctgatgaatcgcaagaagtgcctgctgctggcagcaggagcatggttcggaggcagcctggatggctttctgctgacccctatcacaatgaacgtgccatattgcggctccagatctatcaatcacttcttttgtgagatccctgccgtgctgaagctggcatgcgcagacacctccctgtacgagacactgatgtatatctgctgcgtgctgatgctgctgatccccatcagcatcatcagcacctcctactctctgatcctgctgacagtgcaccggatgagatccgccgagggcaggaagaaggccttcaccacatgtagctcccacctgaccgtggtgtccatcttctatggcgccgccttttacacctatgtgctgccccagtccttccacacacctgagcaggataaggtggtgtctgccttttacaccatcgtgacaccaatgctgaaccccctgatctattctctgcgcaataaggacgtgatcggcgccttcaagaaggtgtttgcctgctgttctagcgcccagaaggtggccaccagcgatgcctga

SEQ ID NO: 219 - DNA, 957 bp, Artificial Sequence
  OR2T11 consensus-b
atggagaacctgctgcagaatagcaccgacttcgtgctgctgggcctgatcacacaccccgccttccctggcctggtgtttgccatcgtgttctctatctttgtggtggccatcaccgccaacgtggtcatgatcctgctgatccacgtggacagccggctgcacacacccatgtactttctgctgagccagctgtccatcatggataccatctatatctgtatcacagtgcctaagatgctgcaggacctgctgagcaaggataagaccatctccttcctgggctgcgccatccagatctttctgtacctgacactgatcggcggcgagttctttctgctgggcctgatggcctacgacagatatgtggccgtgtgcaacccactgcgctatcccctgctgatgaatcggagaaagtgcctgttcatggtggcaggatcttgggtgggaggaagcctggatggcttcatgctgacccccgtgacaatgtcttttccttactgcggcagcagggagatcaaccacttcttttgtgagatcccagccgtgctgaagctgtcctgcgcagacacctctctgtacgagacactgatgtatgcctgctgcgtgctgatgctgctgatccctctgagcgtgatctccgtgtcttacaccctgatcctgctgacagtgcacaggatgccatccgccgagggcaggcgcaaggccttcgccacctgtagctcccacctgacagtggtgtccatcttctacggcgccgccttttataccaatgtgctgccacactcctatcacacacccgagaaggataaggtggtgtctgccttttacaccatcctgacacctatgctgaacccactgatctattccctgaggaataaggacgtggcagccgccctgaggaaggtgctgggcagatgcggctctagccagaagatcagaacctctgatgcctga

SEQ ID NO: 220 - DNA, 951 bp, Artificial Sequence
  OR2T11 consensus-c
atgaagaacaccagctcctctgacttcatcctgctgggactgctggtgaacagcgaggcaaccggcatcgtgtttacagtgatcttcgccatctttgtggtggccgtgacagccaacctggtcatgatcttcctgatccaggtggattctcggctgcacaccccaatgtacttcctgctgagccagctgtccatcatggacacactgtttatctgtaccacagtgcccaagctgctggtggatatggtgtctaaggagaagaccatcagcttcgtggcctgcggcatccagatctttctgtacctgacaatgatcggcagcgagttctttctgctgggcctgatggcctacgacagatatgtggccgtgtgcaaccccctgaggtatcctgtgctgatgaatcgcaaggtgtgcctgctgctggcagcaggagcatggttcggaggcagcctggatggctttctgctgacccctatcacaatgaacgtgccatattgcggctccagatctatcaatcacttcttttgtgagatccctgccgtgctgaagctggcatgcgcagacacctccctgtacgagacactgatgtatatctgctgcgtgctgatgctgctgatccccatcagcatcatcagcacctcctactctctgatcctgctgacagtgcaccggatgagatccgccgagggcaggaagaaggccttcaccacatgtagctcccacctgaccgtggtgtccatcttctatggcgccgccttttacacctatgtgctgccccagtccttccacacacctgagcaggataaggtggtgtctgccttttacaccatcgtgacaccaatgctgaaccccctgatctattctctgcgcaataaggacgtgatgggcgccttcaagaaggtgtttgcctgctgttctagcgcccagaaggtggccaccagcgatgcctga

SEQ ID NO: 221 - DNA, 963 bp, Artificial Sequence
  OR2W1 consensus-a
atggaccagaggaactacagctccctgcacggcttcatcctgctgggcttttctgatcacccaaagatggagatgatcctgagcggcgtggtggccatcttctacctgatcacactggtgggcaataccgccatcatcctggccagcctgctggactcccagctgcacacccccatgtatttctttctgcggaacctgtccttcctggatctgtgctttaccacatctatcatcccacagatgctggtgaatctgtggggccccgacaagacaatcagctatgtgggctgcatcatccagctgtacgtgtatatgtggctgggctccatcgagtgtctgctgctggccgtgatgtcttacgatagattcaccgccatctgcaagcctctgcactattttgtgatcatgaacccacacctgtgcctgaagatgatcatcatggtgtggtctatcagcctggccaactctgtggtgctgtgcacactgaccctgaatctgcccacatgtggcaacaatctgctggaccacttcctgtgcgagctgcctgccctggtgaagatcgcctgcgtggataccacaaccgtggagatgtccgtgtttgccctgggcatcatcatcgtgctgacccctctgatcctgatcctgatcagctacggctatatcgccaaggccgtgctgcggatgaagtccaaggccggccagagaaaggccatgaacacatgcggctctcacctgaccgtggtgagcatcttctacggcacaatcatctacatgtatctgcagcccggcaattccgcctctaaggaccagggcaagttcctgacactgttttacacaatcatcaccccctccctgaaccctctgatctataccctgagaaataaggacatgaaggatgccctgaagaagctgatgaggtttcaccacaagagcaccaagatcaagcgcaattgtaagtcctga

SEQ ID NO: 222 - DNA, 963 bp, Artificial Sequence
  OR2W1 consensus-b
atggaccagtctaactacagctccctgcacggcttcatcctggtgggctttagcgatcggcctaagctggagatgatcctgttcggcgtggtggccatcttttacctgatcacactggtgggcaataccacaatcatcctggccagcctgctggactcccagctgcacaccccaatgtatttctttctgagaaacctgtctttcctggatctgtgctttaccacaagcatcatccctcagatgctggtgaatctgtggggcccagacaagacaatcagctacgtgggctgcgccatccagctgtacgtgtatctgtggctgggaggagtggagtgtctgctgctggccgtgatggcctacgataggtataccgccgtgtgcaagcccctgcactatttcgtgatcatgcaccctcacctgtgcctgaagctgatcatcatggcctggtctagcggcctggccaactccgtggtcatgtgcccactgacactgaatctgccccgctgtggcaacaatatcgtggaccacttcctgtgcgagatgccagccctgatcaagatggcctgcgtggataccacaaccgtggagatgctggtgtttgccctggccatcatcatcgtgctgacacccctgatcctgatcctgatcagctacggctatatcgccaaggccgtgctgcggatcaagtccgccgcaggacagagaaaggccttcaacacatgctcctctcacctgaccgtggtgagcctgttttacggcaccatcatctacatgtatctgcagccaggaaatagggcatcccaggaccagggcaagttcctgacactgttttacacaatcgtgaccccctctctgaaccctctgatctataccctgaggaataaggacgtgaaggatgccctgaagaagctgctgggctttcaccacaagtccaccaagatcaagcgcaactgtaagtcttga

SEQ ID NO: 223 - DNA, 963 bp, Artificial Sequence
  OR2W1 consensus-c
atggaccagtccaactacagctccctgcacggcttcatcctgctgggcttttctgatcacccaaagctggagatgatcctgagcggcgtggtgacaatcttctacctgatcacactggtgggcaataccgccatcatcctggccagcctgctggactcccacctgcacacccccatgtatttctttctgaggaacctgtccttcctggatctgtgctttaccacatctatcatcccacagatgctggtgaatctgtggggccccgacaagacaatctcttatgtgggctgcgtgatccagctgtacgtgtatatgtggctgggctccatcgagtgtctgctgctggccgtgatgtcttacgatcggtttaccgccatctgcaagcctctgcactacctggtcatcatgaacccacacctgtgcctgaagatgatcatcatggtgtggtctatcagcctggccaactctgtggtgctgtgcacactgaccctgaatctgcccagatgtggcaacaatctgctggaccacttcctgtgcgagctgcctgccatggtgaagatcgcctgcgtggataccacaaccgtggagatgagcgtgtttgccctgggcatcgtgatcgtgctgacacctctgatcctgatcctgatcagctacggctatatcgccaaggccgtgctgcggatgaagtccaaggccggccagagaaaggccatgaacacatgcggctctcacctgaccgtggtgagcatcttctacggcaccatcatctacatgtatctgcagcccggcaattccgcctctaaggaccagggcaagttcctgacactgttttacacaatcatcacccccagcctgaaccctctgatctataccctgagaaataaggacatgaaggatgccctgaagaagctgatgagggtgcaccacaagagcaccaagatcaagcgcaattgtaagtcctga

SEQ ID NO: 224 - DNA, 948 bp, Artificial Sequence
  OR2W3 consensus-c
atggagcctgaggccggcaccaatcggacagccgtgaccgagtttatcctgctgggcctggtggagacagaggagctgcagtccgtggtgttcgtgctgtttctgttcgcctacctggtgaccgtgggcggcaatctgtctatcctggccgccatcctggtggagccaaagctgcacacccccatgtatttctttctgggcaacctgtccgtgctggacgtgggctgcatcaccgtgacagtgccagcaatgctgggccggctgctgtctcacaagagaacaatcagctacgatgcctgtctgtcccagctgttctttttccacctgctggccggcatggactgctttctgctgaccgccatggcctacgataggttcctggccatctgtcgccctctgacatattctacccggatgagccagacagtgcagagaatcctggtggccgtgtcttgggcctgtgcctttaccaatgccctgacccacacaatcgccctgaccacactgaacttctgcggccctaacgaagtgaatcacttttactgtgacctgccacagctgttccagctgagctgcagctccacacagctgaacgagctgctgctgtttgccgtgggcttcatcatggccggcacaccactggtgctgatcatcacctcttatatccacgtggcagcagccgtgctgaggatccgcagcgtggagggccggaagaaggccttttccacatgcggctctcacctgaccgtggtgtgcctgttttacggcacaggcatcttcaattatatgagactgggcagcgaggaggcctccgacaaggataagggcgtgggcgtgttcaacaccgtgatcaatcccatgctgaaccctctgatctatagcctgaggaacccagatgtgcagggcgccctgtggcgcgtgctggtgggccggagatccctgacctga

SEQ ID NO: 225 - DNA, 936 bp, Artificial Sequence
  OR2Y1 consensus-c
atgggctccttcaacacctcttttgaggagggcttcatcctggtgggcttttccgactggccccagctggagcctatcctgttcgtgtttatcctgatcttttattccctgaccctgttcggcaataccacaatcatcgccctgtctcggctggacctgagactgcacacaccaatgtatttctttctgtctcacctgagcttcctggatctgtgctacaccacatctaccgtgccccagctgctgatcaacctgtgcggcctggacaggacaatctcttacggcggctgcgtggcccagctgtttatctatctggccctgggcagcacagagtgcgtgctgctggtggtcatggccttcgatagatacgcagccgtgtgcaggcctctgcactataccacaatcatgcacccacacctgtgccagaccctggcaatcgcaagctgggtgggaggctttgtgaactccctgatccagacaggcctggcaatggcaatgccactgtgcggacaccgcctgaatcacttcttttgtgagatgcccgtgttcctgaagctggcctgcgaggataccgagggcacagaggccaagatgttcgtggccagagtgatcatcctggtggtgcctgccgccctgatcctgggaagctatgtgcacatcgcccacgccgtgctgagagtgaagtccatggcaggccggagaaaggccttcggcacctgtggctctcacctgctggtggtgttcctgttttacggcagcgccatctacacatatctgcagcccatccacaattacagcgagtccgagggcaagtttgtggccctgttctataccatcatcacaccaatgctgaaccccctgatctacaccctgcggaataaggacgtgaagggcgccctgtggaaggtgctgggaaggggccgcgatagcggctga

SEQ ID NO: 226 - DNA, 948 bp, Artificial Sequence; identical to SEQ ID NO: 224
  OR3A2 consensus-c

SEQ ID NO: 227 - DNA, 945 bp, Artificial Sequence
  OR4A16 consensus-c
atgggcccaagcaacaatgtgaccgagtttgtgctgctgggcctgacacaggaccccgatggccagaaggccctgttcgtgatgtttctgctgatctacatcgtgaccatggtgggcaacctgctgatcgtggtgacagtgatcgcctctcctagcctgggcagcccaatgtacttctttctggcctatctgtccctgatggacgccgtgtatagcaccgccatgtcccctaagctgatcatcgacctgctgtgcgataagaagacaatctccttttctgcctgtatgggccagctgttcatcgagcacctgtttggaggagcagaggtgttcctgctggtggtcatggcctacgatagatatgtggccatctgtaagccactgcactacctgaccatcatgaatagacaggtgtgcatcctgctgctggtggtggcatggatcggaggcttcgtgcactccgtggtgcagatcgtgttcgtgtataacctgcccttttgcggccctaatgtgatcgaccacttcatctgtgatatgtacccactgctggagctggcatgcaccgacacatacttcatcggcctgaccgtggtggcaaacggaggagcaatctgtatggtcatcttcatcctgctgctgatctcttacggcatcatcctgaacagcctgaagacatatagccaggagggccggagaaaggccctgagcacctgtagctcccacatcacagtggtggtgctgttctttgtgccctgcatcttcatgtacgtgaggcccgtgtccaactttcctatcgataagtctatgaccgtggtgtacaccgtgatcacaccaatgctgaatcccctgatctatacactgagaaactccgagatgaagaatgccatgaagaagctgtggtgcaagaagctgaccatcgtgaggaagcgcgtgtctcctacatga

SEQ ID NO: 228 - DNA, 936 bp, Artificial Sequence
  OR4C15 consensus-c
atgcagaaccagagcttcgtgaccgagtttgtgctgctgggcctgtcccagaaccccaatgtgcagaagatcgtgttcgtggtgttcctgttcgtgtacatcgccaccgtgggcggcaatatgctgatcgtggtgacaatcctgagctcccccgccctgctgggctcccctatgtatttctttctggccttcctgtcttttctggacgcctgtttttctagcgtgatcaccccaaagatgatcgtggattctctgtacgagcggaagacaatcagcttcgagggctgcatgatgcagctgtttgccgagcacttctttgccggcgtggaagtgatcgtgctgacagccatggcctacgacagatatgtggccatctgtaagcccctgcactattcctctatcatgaactggagactgtgcggcatcctgatgggagtggcatggaccggaggcttcctgcacagcatgatccagatcctgttcacatttcagctgccattctgcggccccaacgtgatcgaccacttcatgtgcgatctgtaccctctgctggagctggcctgcaccgatacacacatcttcggcctgctggtggtggccaattctggcttcatctgtatcatcatctttagcctgctgctggtgtcctatggcgtgatcctgttttccctgaggacccacagctccgagggccggagaaaggccctgtccacatgtggctctcacatcgccgtggtggtgctgttctttgtgccatgcatcttcgtgtacgccaggcccccttctgccttcagctttgacaagatggtggccatcttctacaccatcctgacacctctgctgaacccactgatctatacctttcgcaacaaggaggtgaagaatgccatgaggaagatctggaatcgcctgatggtggtgtccgatgagaagtga

SEQ ID NO: 229 - DNA, 924 bp, Artificial Sequence
  OR4D5 consensus-c
atgaaccacagcgtggtgaccgagtttatcatcctgggcctgacaaagaagcctgagctgcagggcatcctgtttctgttctttctgatcgtgtacctggtggccttcctgggcaatatgctgatcgtgatcgccatcatctacaacaataccctgcacacaccaatgtacgtgttcctgctgaccctggccgtggtggacatcatctgtaccacaagcatcatccccaagatgctgggcaccatgctgacatctgagaacaccatcagctatggcggctgcatgtcccagctgttctttttcacatggagcctgggcgccgagatggtgctgtttaccacaatggcctacgatagatatgtggccatctgtttccccctgcactactccaccatcatgaatcaccacatgtgcgtggccctgctgagcatggtcatggccatcgccgtgaccaactcctgggtgcacacaggcctgatcctgaggctgaccttttgcggccccaatacaatcgaccactttttctgtgagatcccacctctgctggccctgtcctgctctcctgtgcgcatcaacgaagtgatggtgtatgtggccgacatcaccctggccatcggcgacttcatcctgacatgtatctcttacggcttcatcatcgccgccatcctgcggatcagaaccgccgagggcaagcggaaggccttcagcacatgcagctcccacctgatcgtggtgagcctgtactattcccctgtgatctacacctatatcaggccagcctctagctactcctttgagcgcgataaggtggtggccgccctgtatacactggtgaccccaacactgaaccccatggtgtactctttccggaataaggagatgcaggccggcatcagaaaggtgtttgccttcctgaagcactga

SEQ ID NO: 230 - DNA, 945 bp, Artificial Sequence
  OR4D6 consensus-c
atggaccagatcaaccacaccaatgtgaaggagttcgtgttcctggagctgacacggtttagagagctggagttctttctgtttgtggtgttcctggccgtgtacgtgaccacagtgctgggcaacgccctgatcgtggtgaccatcacatgtgagagccggctgcacaccccaatgtatttcctgctgagaaataagtccgtgctggacatcgtgtttagctccatcaccgtgcccaagttcctggtggatctgctgtctgagcggaagacaatcagctacaacggctgcatggcccagatcttctttttccacttcgccggcggcgccgacatctttttcctgagcgtgatggcctacgatagatatctggccatcgccaagcccctgcactatgtgaccatcatgcggagagaagtgtgggtggccctggtggtggcatcctgggtgggaggaggcctgcactctatcgtgcagatcatcctgatgctgcccctgcctttttgcggccccaacacactggacgccttctactgtgatgtgcctcaggtggtgaagctggcctgcaccgacacatttgccctggagctgctgatgatctctaacaatggcctggtgaccctgctgtggttcctgctgctgctgggcagctataccgtgatcctggtcatgctgcggagccacagcggagagggaaggaataaggccctgagcacctgtacatcccacatcctggtggtgaccctgcactttgtgccttgcgtgtacatctattgtaggcctttcaccacactgccaatggataccgccgtgtccatcaacaataccgtgatcacaccaatgctgaaccccatgatctacacactgaggaatcaggagatgaagtctgccatgcagcgcctgcagaggcgcctgggaccatccgagtctaggaagctgggctga

SEQ ID NO: 231 - DNA, 939 bp, Artificial Sequence
  OR4F15 consensus-c
atggacggcatgaaccactctgtggtgagcgagttcgtgtttctgggcctgaccaattcctgggagatccagctgctgctgttcgtgttttccctgctgttctactttgcctctatgatgggcaacctggtcatcgtgttcaccgtgacaatggatgcccacctgcactctccaatgtatttcctgctggccaatctgagcgtgatcgacatggccttttgctccatcaccgcccccaagatgatctgtgatatcttcaagaagcacaaggccatcagctttcggggctgtatcacccagatcttcttttcccacgcagtgggaggaacagagatggtgctgctgatcgccatggccttcgacagatacgtggccatctgtaagcccctgcactatctgaccatcatgagccctcgcatgtgcctgtactttctggtgacatcttggatcatcggcctgatccacagcctggtgcagctggtgttcgtggtggatctgccattttgcggccccaacgtgctggactccttctattgtgatctgcctaggctgctgaggctggcatgcaccaacacacaggagctggagttcatggtgaccgtgaacagcggcctgatctccgtgggctcttttgtgctgctggtcatcagctacatcttcatcctgtttacagtgtggaagcacagctccggaggcctgagcaaggccctgagcaccctgtccgcccacatcacagtggtggtgctgttctttggccccctgatgttcttttacacctggccctctcctacaagccacctggacaagtatctggccatcttcgatgcctttatcacccctttcctgaacccagtgatctacacatttcggaataaggagatgaaggtggccatgcggagactgtgctcccggctggtgcactatagaaagatctcttga

SEQ ID NO: 232 - DNA, 975 bp, Artificial Sequence
  OR4K15 consensus-c
atgaacgagacaaatcactccagggtgacagagtttgtgctgctgggcctgagctcctctcgcgagctgcagcctttcctgtttctgatcttttctctgctgtacctggccatcctgctgggcaacttcctgatcatcctgaccgtgacaagcgactcccggctgcacacccccatgtatttcctgctggccaatctgtcctttatcgatatctgcgtggcctctttcgccacccctaagatgatcgccgactttctggtggagcggaagacaatcagcttcgatgcctgcctggcccagatcttctttgtgcacctgttcaccggctctgagatggtgctgctggtgagcatggcctacgacagatatgtggccatctgtaagccactgcactacatgacaatcatgtcccggagagtgtgcatcatcctggtgctgatcagctggttcgtgggctttatccacaccacatcccagctggccttcaccgtgaacctgcccttttgcggccctaatcaggtggactctttcttttgtgatctgcccctggtgaccaagctggcctgcatcgacacatacgtggtgagcctgctgatcgtggccgattctggcttcctgagcctgagctcctttctgctgctggtggtgtcctataccgtgatcctgatcacagtgaggaaccgctctagcgccagcatggcaaaggcaaggtccaccctgacagcccacatcaccgtggtgacactgttctttggcccttgtatcttcatctacgtgtggccattttcctcttattctgtggataaggtgctggccgtgttctacaccatctttacaccaatcctgaaccccgtgatctataccctgcgcaataaggaggtgaaggccgccatgtccaagctgaagtctcggtatctgaagcccggccaggtgagcgtggtcatcagaaatgtgctgttcctggagacaaagtga

SEQ ID NO: 233 - DNA, 942 bp, Artificial Sequence
  OR4Q3 consensus-a
atgaagaaggagcaggactccaacgtgaccgagttcgtgctgctgggcctgagctcctcttgggagctgcagctgttcctgtttctgctgtttctgttcttttacatcgccatcgtgctgggcaatctgctgatcgtggtgaccgtgcaggtgcacgcccacctgctgcagtctcctatgtactatttcctgggccacctgtcctttatcgacctgtgcctgtcttgcgtgacagtgccaaagatgctgggcgatttcctgcagcagagcaagtccatctcttttagcggctgtctggcccagatctacttcctgcactttctgggcgcctctgagatgttcctgctgaccgtgatggcctacgacagatatgtggccatctgtaacccactgcgctatctgacagtgatgaatccacagctgtgcctgtggctggtgctggcatgctggtgtggaggctttatccacagcatcatgcaggtcatcctggtcatccagctgccattctgcggccccaacgagctggacaacttctactgtgatgtgccccaggtcatcaagctggcctgcatggatacatatgtggtggaggtgctgatgatcgccaacagcggcctgctgtccctggtgtgcttcctggtgctgctgttttcctacgccatcatcctgatcaccctgcggacacacttcagacagggccagaataaggtgctgtctacctgcgccagccacctgacagtggtgagcctgatcttcgtgccctgcgtgtttatctatctgcggcctttctgttccttttctgtggacaagatcttctccgtgttttacaccgtgatcacacctatgctgaacccactgatctataccctgcggaatgccgatatgaagacagccatgaagaagctgaggatcaagccttgcggcatccccctgccttgttga

SEQ ID NO: 234 - DNA, 963 bp, Artificial Sequence; identical to SEQ ID NO: 223
  OR4Q3 consensus-b

SEQ ID NO: 235 - DNA, 942 bp, Artificial Sequence
  OR4Q3 consensus-c
atgaagaaggagaacgactccaaggtgaccgagttcgtgctgctgggcctgagctcctcttgggagctgcagctgttcctgtttctgctgttcctgctgttttacatcgccatcgtgctgggcaatctgctgatcgtggtgaccgtgcaggcagatgcacacctgctgcagagcccaatgtactatttcctgggccacctgtcctttatcgacctgtgcctgtcttgcgtgacagtgcccaagatgctgggcgatttcctgcagcagggcaagagcatctccttttctggctgtctggcccagatctacttcctgcactttctgggcgcctccgagatgtttctgctgaccgtgatggcctacgacagatatgtggccatctgtaaccctctgcactatctgacagtgatgaataggcagctgtgcctgcagctggtgttcgcctgctggtgtggcggctttatccactctatcacccaggtcatcctggtcatccagctgccattctgcggccccaacgagctggacaacttctactgtgatgtgccacaggtcatcaagctggcctgcatggatacatatgtggtggaggtgctgatggtgagcaactccggcctgctgagcctggtgtgcttcctggtgctgctgttttcctacgccgtgatcctgatcaccctgcggacaagattcaggcagggccagtccaaggccctgtctacctgcgccagccacctgacagtggtgtctctgatcttcgtgccctgcgtgtttatctatctgagacctttctgttcttttagcgtggacaaggtgttcagcgtgttttacaccgtgatcacacctatgctgaacccactgatctataccctgcgcaatgccgatatgaagacagccatgaagaagctgcggaagaagccatgcggcatccccctgccttgttga

SEQ ID NO: 236 - DNA, 936 bp, Artificial Sequence
  OR4S2 consensus-a
atggagaagatcaacaatgtgaccgagttcatcttttggggcctgtctcagagccctgagatcgagaaggtgtgcttcgtggtgttttctttcttttacatcatcatcctgctgggcaatctgctgatcatgctgaccgtgtgcctgaacaatctgtttaagagccccatgtacttctttctgagcttcctgtcctttgtggacatctgctatagctccgtgaccgcccctaagatgatcgtggacctgctggccaaggataagacaatctcctacgtgggctgtatgctgcagctgtttggcgtgcacttctttggctgcaccgagatcttcatcctgacagtgatggcctacgacagatatgtggccatctgtaagccactgcactatatgaccatcatggatcaggagagatgcaacaagatgctgctgggcacatgggtgggcggctttctgcactctatcatccaggtggccctggtggtgcagctgcccttttgcggccctaatgagatcgaccactacttctgtgatgtgcaccccgtgctgaagctggcctgcaccgatacatatatcgtgggagtggtggtgaccgccaacagcggaacaatcgccctgggctccttcgtgatcctgctgatctcctactctatcatcctggtgtccctgaggaagcagtctgccgagggccggagaaaggccctgtctacctgtggcagccacatcgccgtggtcatcatcttctttggcccttgcacattcatgtatatgagaccagacaccaccttcagcgaggataagatggtggccgtgttctacaccatcatcacaccaatgctgaaccccctgatctataccctgaggaacgccgaggtgaagaatgccatgaagaagctgtggggccgcaacgtgttcctggaggccaagggcaagtga

SEQ ID NO: 237 - DNA, 936 bp, Artificial Sequence
  OR4S2 consensus-b
atggagaagatcaacaatgtgaccgagttcatcttttggggcctgtctcagagccctgaggtgcagcgggtgtgcttcgtggtgtttctgttcttttacatcgccatcgtgctgggcaacctgctgatcgtgctgaccgtgtgcctgtccaattctctgaagagccccatgtacttctttctgtctttcctgagctttgtggagatctgctatagctccgtgaccgcccctaagatgatcgtggacctgctggccaaggataagacaatctcctacgtgggctgtatgctgcagctgttctttgtgcacttctttggctgcaccgagatctttctgctgacagtgatggcctacgacagatatgtggccatctgtaagccactgcactatatgaccatcatgaacagacagacatgcaataagctggtgctgggaacctgggtgggaggcttcctgcacagcatcatccaggtgctgctggtggtgcagctgcccttttgcggccctaacgtgatcgaccactatttctgtgatctgcaccccgtgctgaagctggcctgcaccgataccttcatcgtgggcgtggtggtgaccgccaattccggcacaatcgccctgggctctttcgtgatcctgctgatcagctactccatcatcctggtgtctctgaggaagcagagcgccgagggccggagaaaggccctgtccacctgtggctctcacatcacagtggtcatcctgttcttcggcccttgcatcttcatgtatatgcgcccaagcaccacattttccgaggacaagatggtggccgtgttctacaccatcatcacaccaatgctgaaccccctgatctataccctgaggaacgccgaggtgaagaatgccatgaagaagctgtggggccgcaacgtgttcctggaggccaagggcaagtga

SEQ ID NO: 238 - DNA, 936 bp, Artificial Sequence
  OR4S2 consensus-c
atggagaagatcaacaatgtgaccgagttcatcttttggggcctgtctcagaaccctgaggtggaggaggtgtgcttcgtggtgtttagcttcttttacatcatcatcctgctgggcaacctgctgatcatgctgaccgtgtgcctgggcaatctgtttaagagccccatgtacttctttctgaactatctgtccttcgtggacatctgctacagctccgtgaccgcccctaagatgatcgtggacctgctggccaaggataagacaatctcctatgtgggctgtatgctgcagctgtttggcgtgcacttctttggctgcaccgagatcttcatcctgacagtgatggcctacgacagatatgtggccatctgtaagccactgcactatatgaccatcatggatagggagcggtgcaataagatgctgctgggcacatgggtgggcggctttctgcactctatcatccaggtggccctggtggtgcagctgcccttttgcggccctaacgagatcgaccactacttctgtgatgtgcaccccgtgctgaagctggcctgcaccgatacatatatcgtgggcgtggtggtgaccgccaatagcggcacaatcgccctgggctccttcgtgatcctgctgatctcttacaccgtgatcctggtgtccctgaggaagcagtctgccgagggccggagaaaggccctgtctacctgtggcagccacatcgccgtggtcatcatcttctttggcccttgcacattcatgtatatgcgcccagacaccacattttccgaggataagatggtggccgtgttctacaccatcatcacaccaatgctgaatcccctgatctataccctgcggaacgccgaggtgaagaatgccatgaagaagctgtggggcagaaaggtgttcctggaggccaagggcaagtga

SEQ ID NO: 239 - DNA, 945 bp, Artificial Sequence; identical to SEQ ID NO: 230
  OR5A2 consensus-c

SEQ ID NO: 240 - DNA, 963 bp, Artificial Sequence
  OR5C1 consensus-c
atgaactccgagaatttcacctgggcccgggtggcaccagcagagtttatcctgctgggcatcaccgaccgctgggatctgcgggtgacactgttcctgatctttctgcccgtgtatctggtgtccctgctgggcaacgtgggcatggtgctgctgatcagagtggacgccaggctgcacacccccatgtatttctttctggccaatctgtctctgctggacgcctgttacagctccgccatcggccctaagatgctggtggatctgctgctgcctagagccaccatcccatatacagcctgcgccctgcagatgttcgtgtttgcaggcctggcagacgcagagtgctgtctgctggcagcaatggcctacgatagatatgtggccatcggcaaccccctgctgtacaccacagccatgtcccggcggctgtgcctggccctgctgggagcctctggcctgggcggcgccgtgagcgccttcgtgcacaccacattcacctttcgcctgtctttttgccgcagccgggaggtgaatagcttcttttgtgacatcccccctctgctggccatcagctgcaacgatacatccctgaatgagctgctgctgttcgccgtgtgcggctttatccagaccgccacagtgctggccatcgccgtgagctacggcttcatcgcaggagccgtgatcagaatgaggtccgccgagggcaggcgccgggcagcctccacctgcggctctcacctgacagccgtggccatgctgtacggcaccctgatcttcatgtatctgcggccttctagctcctacgccctggacaccgataagatggccagcgtgttctacacactggtcatcccagccctgaaccccctgatctacagcctgcgcaataaggaggtgaaggaggccctgagaaggacatggtcccggttttgctgtccaggccagggctctcagtga

SEQ ID NO: 241 - DNA, 933 bp, Artificial Sequence
  OR5W2 consensus-c
atgaggaatcacaccgagatcacagagttcatcctgctgggcctgtccgacgatccacagctgcaggtggtcatcttcgtgtttctgctgatcacctacatgctgtccatcaccggcaatctgacaatcatcaccctgacactgctggactctcacctgcagaccccaatgtatttctttctgcgcaacttcagcctgctggaggtgtcctttaccacagtgtctatccccaagttcctgggcaccatcatcacaggcgacaagaccatctcttttaacgattgtatcgcccagttctttatcctgctgggcgtgacagagttctacctgctggccgccatgagctacgatcggtatatcgccatctgtaagcccctgcactatatgaccatcatgaatcggagagtgtgcacactgctggtgtttgcctcctggctggtgtctttcctgatcatctttcctgccctgatgctgctgctgcagctggactactgcagatccaacatcatcgaccacttcacctgtgattattttccactgctgcagctgtcttgcagcgatacaaagttcctggagatcatgggctttagctgcgccgtgttcaccctgatgtttacactggccctgatcttcctgtcctacatctatatcatcaggaccatcctgcgcatcccctccacctctcagaggacaaaggccttctctacatgtagctcccacatgatcgtgatcagcatctcctacggcagctgcatctttatgtatatcaagccttccgccaaggaccgcgtgtctctgagcaagggcgtggccgtgctgaacacctctgtggcccccatgctgaatcctttcatctacagcctgcggaaccagcaggtgaagagagcctttatggatatggcccggaagaccgtgttctttacaagcaagtga

SEQ ID NO: 242 - DNA, 984 bp, Artificial Sequence
  OR6A2 consensus-c
atggagtggaggaaccagtctggacgcgtgagcgagttcgtgctgctgggatttccagcacctgcaccactgcgggccctgctgttcgcactgagcctgctggcctacgtgctggtgctgaccgagaacacactgatcatcatggccatcagaaatcaccccaccctgcacaagcctatgtacttctttctggccaatatgtcctttctggagatctggtacgtgaccgtgacaatccccaagatgctggccggcttcgtgggcagcaagcaggaccacggccagctgatctcctttgagggctgtatgacacagctgtacttctttctgggcctgggatgcaccgagtgcgtgctgctggccgtgatggcctacgatagatatgtggccatctgtcacccactgcactatcccgtgatcgtgtctggccgcctgtgcgtgcagctggcagcaggatcctgggcaggaggcttcggcatctctatggtgaaggtgtttctgatcagccggctgtcctactgcggcccaaacatcatcaatcacttcttttgtgacgtgtcccccctgctgaacctgagctgcaccgacatgtccacagccgagctgaccgatttcgtgctggccatctttatcctgctgggccctctgtctgtgacaggcgccagctatatggcaatcaccggagccgtgatgcggatcccatccgccgccggcagacacaaggccttctccacatgcgcctctcacctgaccgtggtcatcatcttctacgccgcctctatctttatctatgccagacctaaggccctgtctgcctttgatacaaacaagctggtgagcgtgctgtacgccgtgatcgtgcctctgctgaacccaatcatctattgtctgaggaatcaggaggtgaagcgggccctgagatgcaccctgcacctgtatcagggccaggaccccgatcctaagaaggccagccgcaacgtgtga

SEQ ID NO: 243 - DNA, 945 bp, Artificial Sequence
  OR6B2 consensus-c
atggcaagcccatccaactactccaccgcacccgtgagcgagtttctgctgatctgcttcccaaattatcagagctggcagcactggctgagcctgccactgtccctgctgtttctgctggcaatgggagcaaacgccaccctgctgatcacaatccagctggaggcctccctgcacgagcccatgtactatctgctgtccctgctgtctctgctggacatcgtgctgtgcctgacagtgatccctaaggtgctggccatcttctggtttgatctgaggtctatcagcttctccgcctgttttctgcagatgttcatcatgaatagctttctgcccatggagtcctgcaccttcatggtcatggcctacgacagatatgtggccatctgtcaccctctgcgctacccatccatcatcacaaaccagtttgtggccaaggccagcgtgttcatcgtggtgcgcaatgcactgctgaccgcaccaatccccatcctgacagccctgctgcactattgcggcaagaacgtgatcgagaattgcatctgtgccaacctgtctgtgagccggctgtcttgtgacaactttaccctgaatagaatctaccagttcgtggccggctggacactgctgggctctgacttcatcctgatcttcctgagctatacctttatcctgcgggccgtgctgagattcaaggcagagggagcagcagtgaaggccctgtctacatgtggcagccacttcatcctgatcctgttctttagcaccatcctgctggtggtggtgctgacaaatgtggcccggaagagagtgcctatggatatcctgatcctgctgaacgtgctgcaccacctgatcccccctgccctgaatccaatcgtgtacggcgtgcggaccaaggagatcaagcagggcatccagaagctgctgcagaggggccgctga

SEQ ID NO: 244 - DNA, 933 bp, Artificial Sequence; identical to SEQ ID NO: 241
  OR6C1 consensus-c

SEQ ID NO: 245 - DNA, 978 bp, Artificial Sequence
  OR6Y1 consensus-a
atgaccacaatcatcctggaggtggacaaccggaccgtgaccacacacttcatcctgctgggctttcccacacggcctgccttccagctgctgctgttcagcgtgtttctggccacctacctgctgacactgctggagaatctgctgatcatcctggccatccactccgatggccagctgcacaagcctatgtacttctttctgagccacctgtcctttctggagatgtggtacgtgaccgtgatctctccaaagatgctggtggacttcctgagccacgataagtccatctcttttaacggctgtatgacacagctgtacttctttgtgaccttcgtgtgcacagagtatatcctgctggccgtgatggcctttgacagatacgtggccatctgtaacccactgcgctatcccgtgatcatgaccaatcagctgtgcggcacactggcaggaggatgctggttctgtggactgatgaccgccatgatcaagatggtgtttatcgcccagctgcactactgcggcacaccccagatcaaccactatttctgtgatatcagccctctgctgaacgtgagctgcgaggacagctcccaggcagagctggtggatttctttctggccctgatggtcatcgccatcccactgtgcgtggtggtggcatcctacgcagcaatcctggcaaccatcctgcggatcccctctgcccagggcagacagaaggccttttctacctgcgccagccacctgacagtggtcatcctgttctactctaccacactgtttacctatgccagacccaagctgatgtacgcctataactccaataaggtggtgtctgtgctgtacacagtgatcgtgcctctgctgaacccaatcatctattgtctgcggaatagagaggtgaaggccgccctgaggaagaccatccactgcaggggatccggacctcagggaaatggagccttctctagctga

SEQ ID NO: 246 - DNA, 978 bp, Artificial Sequence
  OR6Y1 consensus-b
atgaccacaatcatcctggaggtggacaaccacaccgtgaccacacggttcgtgctgctgggctttcccacaagacctgccttccagctgctgctgttctccatctttctggccacctacctgctgacactgctggagaatctgctgatcatcctggccatccactctgatggccagctgcacaagcctatgtacttctttctgtcccacctgtcttttctggagatgtggtacgtgaccgtgatcagcccaaagatgctggtggacttcctgtcccacgataagtctatcagctttaacggctgtatgacacagctgtacttctttgtgaccttcgtgtgcacagagtatatcctgctggccgtgatggcctttgacagatacgtggccatctgtaacccactgcgctatcccgtgatcatgaccaatcagctgtgcggcacactggcaggaggatgctggttctgtggactgatgaccgccatgatcaagatggtgtttatcgcccagctgcactactgcggcatgccccagatcaaccactatttctgtgatatcagccctctgctgaacgtgagctgcgaggacgcaagccaggcagagctggtggatttctttctggccctgatggtcatcgccctgccactgtgcgtggtggtggcatcttacgccgccatcctggccacaatcctgaggatccccagcgcccagggccgccagaaggcctttagcacctgcgcctcccacctgacagtggtcatcctgttctacagcaccacactgtttacctatgcccggcccaagctgatgtacgcctataactccaataaggtggtgtctgtgctgtacacagtgatcgtgcctctgctgaacccaatcatctattgtctgcggaatcacgaggtgaaggccgccctgaggaagaccgtgcactgcagaggatccggacctcagggaaatggagccttcagctcctga

SEQ ID NO: 247 - DNA, 978 bp, Artificial Sequence
  OR6Y1 consensus-c
atgaccacaatcatcctggaggtggacaaccacaccgtgaccacacacttcatcctgctgggctttcccacacggcctgccttccagctgctgctgttcagcatctttctggccacctacctgctgacactgctggagaacctgctgatcatcctggccatccggtccgatggccagctgcacaagcctatgtacttctttctgagcaatctgtcctttctggagatgtggtacgtgaccgtgatctctccaaagatgctggtggacttcctgagccacgataagtccatctcttttaatggctgtatgacacagctgtacttctttgtgaccttcgtgtgcacagagtatatcctgctggccgtgatggcctttgacagatacgtggccatctgtaacccactgagatatcccgtgatcatgaccaatcagctgtgcggcacactggcaggaggatgctggttctgtggactgatgaccgccatgatcaagatggtgtttatcgccagactgcactactgcggcacaccccagatcaaccactatttctgtgatatcagccctctgctgaacgtgagctgcgaggacagctcccaggcagagctggtggatttctttctggccctgatggtcatcgcagtgccactgtgcgtggtggtggcatcctacgcagcaatcctggcaaccatcctgaagatcccctctgcccagggcaggcagaaggccttttctacctgcgccagccacctgacagtggtcatcctgttctactctaccacactgtttacctatgcccgccccaagctgatgtacgcctataactccaataaggtggtgtctgtgctgtacacagtgatcgtgcctctgctgaacccaatcatctattgtctgcggaatagagaggtgaaggccgccctgaggaagaccatccactgcaggggatccggacctcagggaaacggagccttctctagctga

SEQ ID NO: 248 - DNA, 930 bp, Artificial Sequence
  OR7A17 consensus-a
atggagcctgagaacgacacaggcatcagcgagttcctgctgctgggactgtccgaggagccagagctgcagcctttcctgtttggcctgtttctgagcatgtacctggtgaccgtgctgggcaatctgctgatcatcctggccacaatctccgactctcacctgcacacccccatgtatttctttctgtctaacctgagcttcgccgatatctgttttatcagcaccacagtgcctaagatgctgatcaatatccagacccagagcagagtgatcacatacgccggctgcatcacccagatgtgcttcttcgtgctgttcggaggactggactccctgctgctggccgtgatggcctacgataggtttgtggccatctgtcaccctctgcactataccgtgatcatgaacccaaggctgtgcggactgctggtgctggcctcttggatgatcgccgccctgaatagcctgtcccagtctctgatggtgctgtggctgagcttctgcacagacctggagatcccacacttcttttgtgagctgaaccaggtcatccacctggcctgctccgacaccttcctgaatgatatgggcatgtattttgcagcaggactgctggcaggaggaccactggccggcatcctgtacagctattccaagatcgtgagctccatccgggccatctctagcgcccagggcaagtacaaggccttctctacatgcgcctcccacctgtctgtggtgagcctgttttgctgtaccggcctgggcgtgtatctgacctctgccgccacacacaactcccacacctctgccacagccagcgtgatgtacaccgtggccacaccaatgctgaaccccttcatctattccctgcggaataaggatatcaagagagccctgaagatgtcttttaggggcaagcagtga

SEQ ID NO: 249 - DNA, 930 bp, Artificial Sequence
  OR7A17 consensus-b
atggagcctgagaacgacacaggcatctctgagttcctgctgctgggactgagcgaggagccagagctgcagcctttcctgtttggcctgtttctgtccatgtacctggtgaccgtgctgggcaatctgctgatcatcctggccacaatctctgacagccacctgcacacccccatgtatttctttctgagcaacctgtccttcgtggatatctgtttcgtgagcaccacagtgcctaagatgctggtgaatatccagacccagtctaaagtgatcacatacgccggctgcatcacccagatgtgcttcttcgtgctgttcggcggcctggacagctttctgctgacagtgatggcctacgataggttcgtggccatctgtcaccctctgcactataccgtgatcatgaacccaaggctgtgcggactgctggtgctggcctcttggatcatgagcgccctgaacagcctgctgcagtctctgatggtgctgtggctgagcttttgcacagacctggagatcccacacttcttttgtgagctgaaccaggtcatccacctggcctgctccgacaccttcctgaatgatatggtcatgtactttgcagcaggactgctgggaggaggaccactggtgggcatcctgtactcctattctaagatcgtgagctccatccgggccatctctagcgcccagggcaagtataaggccttctctacatgtgcctctcacctgagcgtggtgtccctgttttactgcaccggcctgggcgtgtatctgtcctctgccgccacacacaacagccacagctccgccaccgcctccgtgatgtacaccgtggtgacaccaatgctgaaccccttcatctatagcctgcggaataaggatatcaagagagccctgaagatgttctttaggggcaagcagtga

SEQ ID NO: 250 - DNA, 930 bp, Artificial Sequence
  OR7A17 consensus-c
atggagcctgagaacgacacaggcatctctgagttcctgctgctgggactgagcgaggagccagagctgcagcctctgatcttcggcctgtttctgtccatgtacctgatcaccgtgtttggcaatctgctgatcatcctggccacaatctctgacagccacctgcacacccccatgtatttctttctgagcaacctgtccttcgccgatatctgttttaccagcaccacaatccctaagatgctgatcaatatccagacccagtccaaagtgatcacatacgccggctgcatcacccagatgtatttctttgtgctgttcgccggcctggacagctttctgctgacagtgatggcctacgataggttcgtggccatctgtcaccctctgcactataccgtgatcatgaacccaaggctgtgcggactgctggtgctggtgtcttggatcatcagcgccctgaacagcctgctgcagtctctgatggtgctgtggctgtctttctgcacagacctggagatcccacacttcttttgtgagctgaaccaggtcatccacctggcctgcagcgacaccttcctgaatgatatggtcatgtactttgcagcaggactgctgggaggaggaccactggtgggcatcctgtactcctattctaagatcgtgagctccatccgggccatctctagcgcccagggcaagtataaggccttctccacatgtgcctctcacctgagcgtggtgtccctgttttactgcaccggcctgggcgtgtatctgtcctctgccgccacacacaacagccacagctccgccaccgcctccgtgatgtacaccgtggtgacaccaatgctgaaccccttcatctattccctgaggaataaggatatcaagcgggccctgaagagatcttttggcggcaagcagtga

SEQ ID NO: 251 - DNA, 939 bp, Artificial Sequence
  OR7D4 consensus-a
atggaggccgagaacctgaccgagctgtctgagttcctgctgctgggactgagcgacgatccagagctgcagcctgtgctgttcggcctgtttctgtctatgtacctggtgacagtgctgggcaatctgctgatcatcctggccgtgagctccgacagccacctgcacacccccatgtatttctttctgagcaacctgtccttcgtggatatctgctttatctccaccacagtgcctaagatgctggtgaatatccaggccaggtctaaggacatcagctacatgggctgtctgacccaggtgtatttcctgatgatgtttgccggcatggacaacttcctgctgacagtgatggcctacgatcgctttgtggccatctgccaccctctgcactataccgtgatcatgaatccatgcctgtgcggactgctggtgctggcatcctggttcatcatcttttgggtgtctctggtgcacatcctgctgatgaagcggctgacattctccaccggcacagagatcccacacttcttttgcgagctggcccaggtgctgaaggtggcctgtagcgataccctgctgaacaatatcgtgctgtacgtggccacagccctgctgggcgtgttcccagtggcaggcatcctgttttcctactctcagatcgtgtctagcctgatgaggatgtcctctaccgagggcaagtataaggccttctccacatgcggctctcacctgtgcgtggtgagcctgttttacggcaccggactgggcgtgtatctgagctccgccgtgacccactctagccagtcctctagcacagccagcgtgatgtacaccatggtgacaccaatgctgaacccctttatctattccctgcggaataaggacgtgaagggcgccctgggccggctgctgagcagagccgcctcctgtctgtga

SEQ ID NO: 252 - DNA, 939 bp, Artificial Sequence
  OR7D4 consensus-b
atggaggccgagaacctgaccgagctgtctgagttcctgctgctgggactgagcgaggacccagagctgcagcctgtgctgttcggcctgtttctgtctatgtacctggtgaccgtgctgggcaatctgctgatcatcctggccatcagctccgacagccacctgcacacacccatgtatttctttctgagcaacctgtccttcgtggatatctgttttatctccaccacagtgcctaagatgctggtgaatatccagaccaggtctaaggatatcagctacatgggctgcctgacacaggtgtatttctttatgatgttcgccggcctggacaactttctgctgaccgtgatggcctacgataggttcgtggccatctgtcaccctctgcactatacagtgatcatgaatccaaggctgtgcggactgctggtgctggcatcctggttcatcatcttctggttttctctgctgcacatcctgctgatgaagcggctgaccttttgcaccggcacagagatcccacacttcttttgtgagctggcccaggtgctgaaggtggcctgctccgacacctttctgaacaatatcgtgctgtacgtggccacagccctgctgggcgtgttcccactggcaggcatcctgttttcctactctcagatcgtgtctagcctgatgagaatgtcctctaccaagggcaagtataaggccttctccacatgcggctctcacctgtgcgtggtgagcctgttttacggcacaggcctgggcgtgtatctgagctccgccgtgacccactctagccagtcctctagcacagccagcgtgatgtacaccgtggtgacaccaatgctgaaccccttcatctattccctgagaaataaggacgtgaagggcgccctgggccggctgctgagcagagccgattcctgtccttga

SEQ ID NO: 253 - DNA, 939 bp, Artificial Sequence
  OR7D4 consensus-c
atggaggccgagaaccacaccgaggtgagcgagttcctgctgctgggactgtccgaggacccagagctgcagcctctgctgttcggcctgtttctgagcatgtacctggtgacagtgctgggcaatctgctgatcatcctggccatcagctccgactcccacctgcacacccccatgtatttctttctgagcaacctgtccttcgtggatatctgttttatcagcaccacagtgcctaagatgctggtgaatatccaggcccagtctaaggatatcagctacatgggctgcctgacccaggtgtatttctttatgatcttcgccggcatggacaactttctgctgacagtgatggcctacgataggttcgtggccatctgtcaccctctgcactataccgtgatcatgaatccaaggctgtgcggactgctggtgctggcatcttggttcatcatcttttgggtgagcctggtgcacatcctgctgatgaagcggctgacattttgcaccggcacagagatcccacacttcttttgtgagctggcccaggtgctgaaggtggcctgcagcgacaccctgatcaacaatatcgtgctgtacgtggcaaccgccctgctgggcgtgttcccactgacaggcatcctgttttcctactctcagatcgtgtctagcctgatgaggatgtcctctaccaagggcaagtataaggccttctccacatgtggctctcacctgagcgtggtgtccctgttttacggcaccggactgggcgtgtatctgagctccgccgtgacacactctagccagtcctctagcatcgcctccgtgatgtacaccgtggtgacaccaatgctgaaccccttcatctattctctgcggaataaggatgtgaagggcgccctgggccggctgctgtccagagccgcatcttgcccttga

SEQ ID NO: 254 - DNA, 954 bp, Artificial Sequence
  OR10A2 consensus-c
atggcaggaggaaactggacccgggtgtccgagttcatcctgatgtcttttagctccctgccaacagagatccagagcctgctgttcctgacctttctgatcatctacctggtgacactgatgggcaattccctgatcatcctggtgaccctggccgacccaatgctgcactctcccatgtatttctttctgcggaacctgagcttcctggagatcggcttcaacctggtcatcgtgcccaagatgctgggcaccctgctggcacaggacaccacaatctccttcctgggctgtgccacacagatgtacttctttttctttttcggcgtggccgagtgctttctgctggccaccatggcctacgatagatatgtggccatctgttctcctctgcactatccagtgatcatgaaccagaggacaagagccaagctggcagcagcaagctggttcccaggatttcccgtggccaccgtgcagaccacatggctgttttccttccctttttgcggcacaaacaaggtcaatcactttttctgtgactctccacctgtgctgaggctggtgtgcgcagataccgccctgttcgagatctacgccatcgtgggcacaatcctggtggtcatgatcccctgcctgctgatcctgtgctcctatacccgcatcgccgccgccatcctgaagatccctagcgccaagggcaagcacaaggccttttccacctgctctagccacctgctggtggtgtctctgttctacgtgtccctgtctctgacatattttcggcctaagtctaacaatagcccagagtccaagaagctgctgagcctgtcctacaccgtggtgacacccatgctgaaccctatcatctatagcctgagaaacaatgaggtgaagaatgccctgtctaggacattcagcaaggccctgggcctgcgcaattgtatcccctga

SEQ ID NO: 255 - DNA, 948 bp, Artificial Sequence
  OR10A4 consensus-c
atgatgtggggcaactggaccatcgtgagcgagttcgtgctggtgagcttttccgccctgagctccgagctgcaggccctgctgttcctgctgtttctgaccatctacctggtgacactgatgggcaatgtgctgatcatcctggtgaccacagccgactctgccctgcagagccccatgtatttctttctgcggaacctgtctttcctggagatcggcttcaacctggtcatcgtgcctaagatgctgggcaccctgatcatccaggataccacaatctccttcctgggctgtgccacacagatgtacttctttttctttttcggagcagcagagtgctgtctgctggcaaccatggcctacgacagatatgtggccatctgtgatccactgagatatcccgtgatcatgggccggagagcatgcgcacagctggcagccgcctcctggttctctggctttccagtggccaccgtgcagaccacatggatcttttccttccctttttgcggcccaaacagagtgaatcactttttctgtgacagcccacctgtgatcgccctggtgtgcgcagatacatccctgttcgagctggaggccctgaccgccacagtgctgtttatcctgttcccttttctgctgatcctgggctcttacgtgaggatcctgagcaccatcttccgcatgccatccgccgagggcaagcacaaggccttttctacatgctctagccacctgctggtggtgtccctgttctactctaccgccatcctgacatattttcggccaagatcctctaccagccccgagtccaagaagctgctgtctctgagctacaccgtggtgacacccatgctgaaccctatcatctatagcctgcggaacagcgaggtgaaggccgccctgaggcgcgtgatccaccgcacactgggacctcagaagctgtga

SEQ ID NO: 256 - DNA, 939 bp, Artificial Sequence
  OR10D3 consensus-c
atggaggtgaagaactgcagcatggtgaccgagttcatcctgctgggcatcccacacacagagggcctggagacaaccctgtttgtgctgttcctgcccttttacgcctgtaccctgctgggcaacgtgagcatcctggtggccgtgctgagctccgccaggctgcacacacctatgtatttctttctgggcaatctgtccgtgttcgacatgggcttttctagcgtgacctgcccaaagatgctgctgtacctgatgggcctgtccagactgatctcttataaggactgcgtgagccagctgttctttttccacttcctgggcagcatcgagtgctttctgtacaccgtgatggcctatgataggttcacagccatctgttaccccctgcgctataccgtgatcatgaatcctcggatctgcgtggccctggcagtgggaacctggctgctgggctgcatccactcctctatcctgacatctctgacctttacactgccctactgcggccctaacgaggtggaccactttttctgtgatatcccagccctgctgccactggcatgcgcagataccagcctggcccagcgggtgtccttcacaaatgtgggcctggtgtccctggtgtgcttcctgctgatcctgctgtcttataccagaatcacaatcagcatcctgtccatcaggaccacagagggccggagaagggccttttctacctgcagcgcccacctgatcgccatcctgtgcgcctacggccccatcatcaccgtgtatctgcagcccacacctaacccaatgctgggcacagtggtgcagatcctgatgaacctggtgggccctatgctgaatccactgatctacaccctgcgcaataaggaggtgaagacagccctgaagaagatcctgcacaggaccggacacgtgcctgagtcctga

SEQ ID NO: 257 - DNA, 960 bp, Artificial Sequence
  OR10Q1 consensus-c
atgcctgtgggcaagccagtgctgaaccagagcggcccaaccgagttcgtgttccgggtgttcaccacagtgcccgagttccaggccctgctgtttctgctgttcctgctgctgtacctgatgatcctgtgcggcaatacagccatcatctgggtggtgtgcacccacagctccctgcggacacctatgtacttctttctgagcaacctgtcctttctggagatctgctataccacagtggtggtgccactgatgctgtctaatatcctgggcgcccagaagccaatcccactggcaggatgcggagcacagatgttctttttcgtgaccctgggcagcacagactgtttcctgctggccgtgatggcctacgatagatatgtggccatctgccaccccctgcactataccctgatcatgacacagaagctgtgcacccagatggtgggaggcgccctgggcctggccctgtttctgtccctgcagctgaccgccctgatctttacactgcctttctgcggccaccggagagagatcaaccacttcctgtgcgacgtgccacctgtgctgaggctggcctgtgccgatatccgggtgcaccaggccgtgctgtacgtggtgggcatcctggtgctgaccgtgccatttctgctgatctgcgtgtcttacgtgttcatcacatgtgccatcctgagaatcaggtccgccgagggcaggcgccgggccttttctacctgttctagccacctgacagtggtgctgctgcagtacggctgctgtagcctggtgtatctgcgccctcggtcctctacctccgaggacgaggatagacagatcgccctggtgtacaccttcgtgacacccctgctgaaccctctgatctatacactgaggaataaggacgtgaagggcgccctgagatctgccatcatcaggaaggccgccagcgatgccaattga

SEQ ID NO: 258 - DNA, 975 bp, Artificial Sequence; identical to SEQ ID NO: 232
  OR10Z1 consensus-c

SEQ ID NO: 259 - DNA, 948 bp, Artificial Sequence
  OR11H1 consensus-c
atgaacgtgagcgagcccaatagctcctttgccttcgtgcgggagtttatcctgctgggcttcagctgcgagtggaagatccagatcctgctgttttccctgttcaccacaacctacgccctgacaatcaccggcaatggcgccatcgtgtgcgccctgtggtgtgaccggagactgcacacaccaatgtacatctttctgggcaacttttccttcctggagatctggtacgtgagcagcacagtgcccaagatgctggtgaattttctgtctgagaagaagaccatcagcttcgccggctgctttctgcagttctatttctttttctctctgggcaccagcgagtgttttctgctggccgtgatggccttcgataggtacctggccatctgccgcccactgcactatcccaacatcatgacaggccacctgtgcaccaagctggtcatcatctgctgggtgtgcggctttctgtggttcctgatccccatcgtgctgatctcccagatgcctttttgcggcccaaatatcatcgaccacgtggtgtgcgatccaggacctctgttcgcactggcatgcgtgtctgcccctaggacacagctgctgtgctacaccctgtcctctctggtcatcttcggcaactttctgttcatcctgggctcttataccctggtgctgctggccgtgctgaggatgcctagcgccacaggcagacacaaggccttttccacctgtggctctcacctggccgtggtgagcctgttctacggctccctgatggtcatgtacgtgagcccaggcctgggacactctgccggcatgcagaaggtggccacactgttttacgccatggtgacccccctgttcaaccctctgatctatagcctgaggaataaggagatcaaggccgccctgaggaaggtgctgggcagctccaacatcatctga

SEQ ID NO: 260 - DNA, 975 bp, Artificial Sequence
  OR11H4 consensus-a
atgtccttctttttcgtggacctgcggccaatgaacagatctgccacccacgtggtgacagagttcatcctgctgggctttcccggctgttggaagatccagatcttcctgtttagcctgttcctggtcatctacgtgctgaccctgctgggcaacggcgccatcatctatgccgtgaggtgcaatcctcgcctgcacacaccaatgtactttctgctgggcaatttcgcctttctggagatctggtatgtgagctccaccgtgcccaacatgctggccaatatcctgagcaagacaaaggccatctccttctctggctgcttcctgcagttttactttttcttttccctgggcaccacagagtgtctgtttctggccgtgatggcctacgaccggtatctggccatctgccaccctctgcagtacccagccatcatgaccggcagattctgcggcaagctggtgtccttctgttggctgatcggctttctgggctatcccatccctatcttctttatctctcagctgcccttctgcggccctaacatcatcgatcacttcctgtgcgacatggatcctctgatggcactgtcttgcgcaccagcaccaatcaccgagtgtatcttctacacacagtctagcctggtgctgttctttacctctatctacatcctgcggagctatatcctgctgctgagagccgtgttccaggtgccatccgccgcaggccggagaaaggcctttagcacctgtggctcccacctggtggtggtgagcctgttctatggcaccgtgatggtcatgtacgtgtcccccacctatggcatccctacactgtggcagaagatcctgaccctggtgtactctgtgatgacaccactgttcaaccccctgatctatagcctgaggaataaggatatgaagctggccctgcgcaacgtgctgtttggcatgagggtgcgccagaacagctga

SEQ ID NO: 261 - DNA, 975 bp, Artificial Sequence
  OR11H4 consensus-b
atgtccttctttttcgtggacctgcggccaatgaacagatctgccacccacatcgtgacagagttcgtgctgctgggctttcccggctgttggaagatccagatcttcctgtttagcctgttcctggtggtgtacgtgctgaccctgctgggcaacggcgccatcatctgcgccgtgaggtgtgatcctcgcctgcacacaccaatgtactttctgctgggcaatttcgcctttctggagatctggtatgtgagctccaccgtgcccaacatgctggtgaatatcctgagcaagacaaaggccatctccttctctggctgcttcctgcagttttactttttcttttccctgggcaccacagagtgtctgtttctggccgtgatggcctacgaccggtatctggccatctgccaccctctgcactacccagccatcatgaccggcagattctgcggcaagctggtgtccttctgttggctgatcggctttctgggctatcccatccctatcttctttatctctcagctgcccttctgcggccctaatatcatcgatcacttcctgtgcgacatggatcctctgatggcactgtcttgcgcaccagcaccaatcaccgagtgtatcttctacacacagtctagcctggtgctgttctttacctctatgtacatcctgcggagctatacactgctgctgagagccgtgttccaggtgccatccgccgcaggccggagaaaggcctttagcacctgcggatcccacctggtggtggtgagcctgttctatggcaccgtgatggtcatgtacgtgtcccccacctatggcatccctacactgatgcagaagatcctgaccctggtgtactctgtggtgacaccactgttcaaccccctgatctatagcctgaggaataaggacatgaagctggccctgcgcaacgtgctgtttggcatgaggatccgccagaacagctga

SEQ ID NO: 262 - DNA, 975 bp, Artificial Sequence
  OR11H4 consensus-c
atgtccttctttttcgtggacctgaggccaatgaaccgctctgccacccacatcgtgacagagttcgtgctgctgggctttcccggctgttgggagatccagatcttcctgtttagcctgttcctggtcatctacgtgctgaccctgctgggaaacggagcaatcatctgcgccgtgcggtgggatcctagactgcacacaccaatgtactttctgctgggcaatttcgcctttctggagatctggtatgtgagctccaccgtgcccaacatgctggccaatatcctgtctaagacaaaggccatctccttctctggctgcttcctgcagttttactttttcttttccctgggcaccacagagtgtctgtttctggccgtgatggcctacgacaggtatctggccatctgccaccctctgcactacccaaccatcatgacaggccgcctgtgcggcaagctggtgagcctgtgctggctgatcggcttcctgggctatcccatccctatcttctttatctcccagctgcccttctgcggccctaatatcatcgatcacttcctgtgcgacatggatcctctgatggcactgtcctgcgcaccagcaccaatcaccgagtgtatcttttacacacagtctagcctggtgctgttctttaccatcatgtacatcctgaggtcctatatcctgctgctgagggccgtgttccaggtgccatctgccgcaggccggagaaaggccttttctacctgtggcagccacctggtggtggtgagcctgttctatggcaccgtgatggtcatgtacgtgtcccccacctatggcatccctacactgatgcagaagatcctgaccctggtgtactctgtgatgacaccactgttcaaccccctgatctatagcctgcggaataaggacatgaagctggccctgcggaacgtgctgtttggcatgagaatcagccagaacagctga

SEQ ID NO: 263 - DNA, 963 bp, Artificial Sequence
  OR13C8 consensus-c
atggagcggaccaacgacagcaccctgacagagttcgtgctggtgggcctgtccgcccaccctaagctgcagacagtgttctttgtgctggtgctgtggatgtacctgatgatcctgctgggcaacggcgtgctgatctccgtgatcatctacgattctcacctgcacacccccatgtatttctttctgtgcaatctgagctttctggacatctgttataccagctcctctgtgcctctgatcctggattccttcctgacagtgcggaagagagtgagcttttccggctgtatggtgcagatgttcctgagctttgccatgggagcaaccgagtgcgtgctgctgggcatgatggccctggacagatacgtggccatctgttaccccctgagatatcctgtgatcatgtctaagggagcatatgtgccaatggcagcaggaagctgggtgaccggcctggtggattctgtggtgcagacaagcctggccatgcagctgcccttctgcgccaacaatgtgatcaaccacttcgtgtgcgagatcctggccatcctgaagctggcctgcgccgacatctctatcaacgtgatcagcatggccggctccaatctgatcgtgctggtcatccctctgctggtcatctctatcagctacatcttcatcgtggccaccatcctgaggatcccatccacagagggcaagcgcaaggccttctccacctgctctgcccacctgacagtggtcatcatcttttacggcaccatcttctttatgtatgccaagcccaagagcaaggcctccgtgggctctgacaatcaggatatcatcgaggccctgatctccctgttctacggcgtgatgacaccaatgctgaaccccctgatctattctctgaggaataaggacgtgaaggccgccgtgaagaacatgctgggccgcaagaatttttccgatggcaagtga

SEQ ID NO: 264 - DNA, 945 bp, Artificial Sequence
  OR13G1 consensus-c
atggacggcaccaacggcagcacccagacacacttcatcctgctgggcttttccgataggcctcacctggagcgcatcctgttcgtggtcatcctgatcgcctacctgctgacactggtgggcaataccacaatcatcctggtgtctaggctggacccacacctgcacacccccatgtatttctttctgacacacctgagcttcctggatctgtcctttaccacaagctccatcccacagctgctgtacaacctgaatggctgcgacaagaccatcagctatacaggctgtgccatccagctgttcctgtttctgggcctgggaggagtggagtgtctgctgctggccgtgatggcctacgatcggttcgtggccgtgtgcaagcccctgcactatatggtcatcatgaaccctaggctgtgcaggggcctggtgtccgtggcatggggctgtggcgtggccaattccctggccatgtctcctgtgaccctgaggctgccaagatgcggacaccacgaggtggaccacttcctgtgcgagatgccagccctgatcaggatggcatgcgtgaacaccgcagcagtggagggaacagtgttcgtgctggcagtgggaatcgtgctgtcccccctggtgtttatcctggtgtcttacggctatatcgtgagagccgtgctgcagatccggtctgccagcggcagacagaaggccttcaatacctgtggctctcacctgacagtggtgagcctgttttacggcaacatcatctacatgtatatgcagcccggcaattctagctcccaggatcagggcaagttcctgaccctgttttacaacatcgtgacacccctgctgaatcctctgatctataccctgaggaacaaggaggtgaagggcgccctgcggagactgctgctgggcaagcgcgagctgggcaaggagtga

SEQ ID NO: 265 - DNA, 915 bp, Artificial Sequence
  OR52A4 consensus-c
atggccctgccaatcaccaacggcacactgtttatgcccttcgtgctgacctttatcggcatccctggcctggagtccgtgcagtgctggatcggcatccccttctgtgccatgtacatcatcgccctgatcggcaattctctgctgctgatcatcatcaagagcgagccttccctgcacgagccaatgtatatctttctggccatgctgggcgccaccgacatcagcctgtccacatctatcgtgccaaagatgctgggcatcttttggttccacctgcccgagatctactttgatgcctgcctgttccagatgtggctgatccacacctttcagggcatcgagtctggcgtgctgctggcaatggcactggacagatacgtggccatctgttatcctctgaggcacgccatcgtgttcacccgccagctggtgacatatatcgtggtgggagtgaccctgcggcccgcaatcctggtcatcccttgcctgctgctgatcaagtgtcggctgaagctgtacagaaccaagctgatcagccacacatattgcgagcacatggccctggtgaagctggccacagaggacgtgtacatcaacaagttttatggcatcctgggagccttcatcgtgggaggcctggacttcatcttcatcaccctgtcctacatccagatctttatcacagtgttccacctgcctctgaaggaggccaggctgaaggtgttcaatacctgcatcccacacatctgcgtgttcttccagttttacctgctggccttctttttcatcttctattctcagatctggatcctgtaccccatcatcagaacatatcacctggtgcagagcctgccaaccggaccaacaatcccacagcctctgtacctgtgggtgaaggatcaggcccactga

SEQ ID NO: 266 - DNA, 936 bp, Artificial Sequence
  OR56A4 consensus-c
atggccaacaattccatggtgaccgagtttctgctgctgggcttcagctccctgggcgagatccagctggtgctgtttgtggtgttcctgtgcctgtacctgatcatcctgtccggcaacgtgaccatcatctctgtgatccggctggacaagagcctgcacacaccaatgtatttctttctgggcatcctgtctacaagcgagacattctacacattcgtgatcctgcccaagatgctgatcaacctgctgtctgtgctgaggaccatcagctttaattgctgtgccatccagatgttctttttcctgggcttcgccgtgacaaattgtctgctgctgggcgtgatgggctacgaccgctatgccgccatctgccaccccctgcactaccctatcctgatgtcctggcaggtgtgcggacagctggcagccacctgtggaatcggaggcttcctggcatccctgaccggaacatatctggtgttttctctgcctttctgcggcgccaacaaggtcaatcactacttttgtgatatctctccagtgatccggctggcctgcaccaacacatatatcaatgagctggtcatcttcatctgtggcgtgctggtgctggtggtgccactgctgtttatctgcatcagctatggcttcatcgtgcggaccatcctgaagatcccttccgccgagggcaagagaaaggccttttccacctgtgcctctcacctgacagtggtcatcgtgcactacggctgcgcctctttcgtgtatctgaggcctagcgccaagtacgtgtccaacaaggaccgcctggtgaccgtgacatataccatcgtgacaccactgctgaaccccatggtgtacagcctgcggaataaggatgtgcagctggccatcagaaaagtgatcggcaagaagggcctgaagctgtactga

SEQ ID NO: 267 - DNA, 957 bp, Artificial Sequence
  OR2B11 consensus-c
atgcggagcgacaaccagagcttcctgggagatcccccaaaggccttcatcctgctgggagtgtccgacagaccttggctggaactgcccctgttcgtggtgctgctcgtgtcctacgtgcttgctatgctgggcaacatcgccattatcctggtcagcagattggatccccagctgcacagccctatgtacatcttcctgtctcatctgagcttcctggacctgtgctacaccacaacaaccgtgccacagatgctggtgaacatgggctctagccagaaaaccatcagctacggcggctgcaccgtgcaatacgccatcttccactggctgggctgtaccgagtgcatcgtgctggccgccatggccctggatagatacgtggccatctgcgagcctctgcggtacgccgtgatcatgcacagagccctgtgccagcagctggtggccgtggcctggctgagcggcttcggaaatagcctggtccaagtggttctgaccgtgcagctgcccttctgcggcaggcaggtgctgaacaacttcttttgtgaagtgcctgccatgatcaagctgtcatgcgccgacaccgccgtcaacgacgccacactggctgttctggtggctttcttcgtgctggtgcccctggcactgatcctgctgagctacggatttatcgctagagccgtgctccggattcagtcttctaagggcagacacaaggcctttggcacatgcagcagccacctggtggtggtgtctctgttctacctgcctgctatctacatgtacctgcagcctcctagctcctatagccaggagcagggcaaattcatcagcctgttttacagcatcatcacccctaccctgaatcctttcatctatacactgagaaacaaggacgtgaagggcgccctgcgccggctgctggccagaatctggcggctgtgtagaagatga

SEQ ID NO: 268 - DNA, 963 bp, Artificial Sequence
  OR2C3 consensus-c
atgatggaaatcgccaatgtgtctagccctgaggtgttcgtgctgttgggcttctccgccagacccagcctggagcctatcctgttcatcgtggtgctgggattttacgtggtgagcatcctgggaaacggcatcatcatcctggtcagctgcatggatgtccacctgcacacacctatgtatttcttcctggctaatctgagcttcctggacatcagcttcaccaccagcatcgtgccacagctgctggtgaacctgtggggacctcaaaaaaccatcagctacggcggctgtgtggtccagttctacatcagccattggctcggcgccacagagtgcgttctgcttgctgtgatgagctatgatagatacgccgccatctgcagaccactccactacaccgtgatcatgcaccctcagctgtgcctgggcctggccctggccagctggctgggcggactgacaacctccatggtgggcagcaccctgaccatgctgctgcccctgtgcggcaacaataggatcgaccacttcttctgtgaaatgcctctgatcatgcagctggcctgcgtggacacctccctgaacgaggtggaaatgtacgtggcctcttttatctttgtggtgctgcctctgggcctgatcctggtgtcctacggccacatcgctagagccgtgctgaagatccggagcgccgagggcagacggaaggccttcaacacctgttctagccacgtggctgttgtgagcctgttctacggctctatcattttcatgtacctgcagcctgccaagtctaacagtcacgagcagggcaaattcattgccctgttttacaccgtggtgacacccatgctgaaccccctgatctacacactgcggaacaaggacgtgaagagcgcactgagacacatggtcctggaaaactgctgcggcttcgccggcaagctggcccagatctga

SEQ ID NO: 269 - DNA, 942 bp, Artificial Sequence
  OR2G2 consensus-c
atggtgcggcacaccaacgaaagcaacctggctggctttatcctgctgggcttcagcgactaccctcagctgcaaaaggtgctgtttgtggtgatcctgatcctctacctgctgacaatcctgggaaataccaccatcatcctggtgtcccggctggaacctaagctgcatacccctatgtacttcttcttgtctcacctgagcttcctggacctgtgcttcaccagcagcgtgatcccccagctgctggttaatctgtgggagcctatgaagatgatcacctacggcggatgtgtggtgcagctgtacgttagcctggccctgggcagcaccgagtgtgtgctgctggccgtgatgtcttatgatagatacgtggccgtgtgcagacctctgcactacaccgtgctcatgcacccccacctgtgtatggccctggccagcatggcctggctgtccggcgtggctaccacactggtccagagcacactgaccctgcagctccccttctgcggccacagacaggtggatcacttcatctgcgaggtgcccgtgctgatcaaactggcttgcgtggacacaacattcaacgaggccgagctgttcgtggcctctgtgctgttcctgattgtgccagtgtctttcatcctggtgagctacggctacatcgcccaggccgtgctgaggatcaagtccgccaccggcagacagaaagccttcggcacatgcagcagccacctgatggtcgtgattatcttttacggcaccatcatctttatgtatcttcaacctgccaagagcagaagcaaggaccagggtaaattcgtctctctgttctacaccgtggtcacccctatgctgaaccctctgatctacacactgcggaacaaggaagtgaagggcgctctgaagaaggtgctgggcaaggccctgggagtgaactga

SEQ ID NO: 270 - DNA, 945 bp, Artificial Sequence
  OR2G3 consensus-c
atggaactggctaatgagagctctctgatgggattcatcctgctgggctttagcgatcacccccggctagaagctgtgctttttgtgttcgtgctgtttttctacctgctgacactggtgggcaacttcaccatcatcattatctcttatctggatcctccactgcacacccctatgtacttcttcctgagcaacctgtctctgctggacctgtgttttacaacaagcctggcccctcagacactggtgaacctgcgcggaccagagaagaccattacatacggcggctgtgtggtccagctgtacatctccctcgccctgggatctaccgagtgcatcctgctggctgtgatggccctggatagatacgtcgccgtgtgcaagcccctccattacgtggtgatcatgaaccccagactctgccagcagctggccagcatcagctggctgtccggcctggctaacagcctgatccacgccaccttcaccctgcaactgcctctgtgcggcaatcacagactggaccacttcatctgcgaggtgcccgccctgctgaagctggcctgcgtggacaccacagtgaacgagctggttctcttcgtggtcagcgtgctgttcctgctgatccctcctgccctcatcctgatcagctacggcttcatcacccaggccgtgctgagaatcaagagcgtggaagccagacacaaggccttcagcacctgttctagccacctgaccgtggtgatcatcttctacggcaccatcatctacatgtacctgcagcctagcgacagctacgcccaggaccagggcaaattcatctccctgttctataccatggtgacacctaccctgaaccctatcatctacaccctgcggaacaaggacgtgaaggaagccctgaaaaagctgctgtccggcaagctgtgcagcctgcaaacatga

SEQ ID NO: 271 - DNA, 939 bp, Artificial Sequence
  OR2L2 consensus-c
atggaaaactataaccagaccagcacagatttcatccttttgggcctgtttcctagcagccggatcggcctgttcctgttcatcctgatcgtgctgatcttcctgatggccctgattggaaatctgtccatgatcctgctgattttcctggacacccacctgcacacccctatgtacttcctgctgagccagctgtctctgatcgacctgaactacatcagcaccatcgtccccaagatggcctatgacttcctcttcggcaacaagagcatctcctttatcggttgtggcatccaatcttttttcttcctgaccctggcaggcgctgaaggcctgctgctggcttctatggcttacgatagatacgtggccatctgcttcccactgcactaccccatccggatcagcaagcgggtgtgcgtgctgatgatcaccggcagctggatgatcggctctatcaacagctgcgcccacacagtgtatgccctgtgcatcccctactgcaagtccagagccatcaaccacttcttctgcgacgtgcctgccatgctgaccctggcctgtaccgatacatgggtctacgagtacaccgtgttcctgtctacgaccatctttctgctgctgcctttcatcggaatcgcctgtagctacggcagagtgctgctggccgtgtacagaatgcacagcgccgagggaagaaagaaagcctactccacatgcagcacacatctgacagttgtgaccttctactacgccccttttgcctacacctacctgcgccccagaagcctgcggagccctaccgaggacaaggtgctggctgtgttctacacaatcctcacccctatgctgaatcctattatctacagcctgagaaacaaagaggtgatgggcgccctgcggagagtgatccagagaatcttcagcgtgaagatgtga

SEQ ID NO: 272 - DNA, 939 bp, Artificial Sequence
  OR2L3 consensus-c
atggaaaactacaaccagaccagcacagatttcatcctgctgggcctgtttccacctagcagaatcggcctttttctgtttatcctgatcgtgctgatcttcctgatggccctgattggaaatctgtctatgatcctcctgatccttctggacacacacctgcacacccctatgtacttcctgctgagccaactgagcctgatcgacctgaactacatcagcacaatcgttcctaagatggccagcaacttcctgttcggcaacaagagcatcagctttattggctgtggcgtgcagagcttcttcttcctgaccctgggcggagccgaagccctgctgctgaccagcatggcttacgatagatacgtggccatctgcttccctctgcactaccccatcagaatgtccaagcgggtgtgcgtgctgatgatcaccggcagctggatcatgggatctatcaacagctgcgcccataccgtgtacgccctgcacatcccctactgccggtccagagccatcaatcacttcttctgcgacgtgcctgctatgctgaccctggcttgtatggacacctgggtctacgagtacaccgtgttcgtgtccaccaccctgttcctcgtgtttcccttcatcgccatctcttgtagctacggcagggtcctgctggccgtgtatagaatgaaaagcgccgagggcagaaagaaggcctacagcacctgcagtacacacctgactgtggtgaccttctactacgcccctttcgcatatacctacctgcggcctagatctctgagaagcccaacagaggacaaggtgctggctgtgttctacacaattctgacacctatgctgaaccccatcatctactctctgcggaacaaagaggtgatgggcgccctgcgcagagtgtcccagcggatctgcagcgtgaagatgtga

SEQ ID NO: 273 - DNA, 939 bp, Artificial Sequence
  OR2L5 consensus-c
atggaaaactacaaccagacaagcaccgatttcatcctcctcggcctgttcccccccagcaagattggactgtttctgttcatcctgatcgtgctgatctttctgatggccctgatcggcaatctgagcatgatcctgctcatcttcctggatacacatctgcacacccctatgtacttcctgctgagccagctgtctctgatcgacctgaattacatcagcacaatcgtgcctaagatggccagcgacttcctgtacggcaacaaaagcatctccttcatcggatgtggcatccaaagcttctttttcctgaccctggcaggcgccgaggccctgctgctgacctctatggcttacgacagatacgtggccatctgcttccctctgcactaccctattagaatgtctaagcgggtgtgcgtgctgatgatcaccggcagctggatgatcggctctatcaactcatgcgcccacacagtctatgctctgagaatcccttactgcaagtctagagccattaaccacttcttctgtgatgtgcccgccatgctgacactggcctgcaccgacacatgggtctacgagtacaccgtgttcgtgtccacgaccatcttcctggtgtttccattcaccggaatcgcctgtagctacggcagagtgctgctggctgtttacagaatgcacagcgccgagggccggaaaaaggcctatagcacctgcagcacccacctgacagtggtgaccttctactacgccccttttgcctatacctacctgagacctagaagcctgaggtccccaacagaggacaaggtgctggccgtgttctacaccatcctgacccctatgctgaaccccatcatctacagcctgcggaacaaggaagtgatgggcgctctgcggagagtgatccagaacatcttcagcgtgaagatgtga

SEQ ID NO: 274 - DNA, 939 bp, Artificial Sequence
  OR2L8 consensus-c
atggaaaattacaaccagaccagcaccgattttatcctgctgggcctgtttccacctagcagaatcggactgttcctgttcatcctgatcgtgctgattttcctgatggctctcttcggcaatctgagcatgatcctgctgatcttcctggacacccacctgcacacccctatgtacttcctgctgtctcagctgagcctgatcgacctgaactacatctctaccatcgttccaaagatggcttctgatttcctgcatggcaacaagagcatcagctttattggatgtggcgtgcagagcttcttcttcctgacactggccggcgctgaagccctgctgctggccagcatggcctacgacagatacgtggccatctgcttccccctgcactaccctatcagaatgagcaagagagtgtgcgtgctgatgatcaccggcagctggatcatgggatccatcaacagctgcgcccacacagtgtatgtgctgcacatcccttactgcagatcccgggccatcaaccacttcttctgcgacgtgcccgccatgctgacactggcctgcatggacacctgggtgtacgagtacaccgtgttcgtgtccaccaccctcttcctcgtgttccctttcatcggcatcgcctgtagctacggccgggtcctgctggccgtgtaccggatgaagtctgccgagggccggaaaaaggcctatagcacatgctccacccacctgaccgttgtgaccttctactacgccccttttgtgtatacatacctgcggcctagaagccttagaagccctaccgaggataaggtgctggctgtgttttacacaatcctgacacccatgctgaaccccatcatctacagcctgaggaacaaagaggtgatgggcgccctgcgcagagtcatccaaagaatctgttctgtgaagatgtga

SEQ ID NO: 275 - DNA, 939 bp, Artificial Sequence
  OR2L13 consensus-c
atggaaaagtggaaccagaccagcaacgacttcatcctgcttggactgtttccacctaatcaaacaggcctgctgctgctgctgctgatcattctgatcttctttctggccagcgtgggcaacagcgccatgatccacctgatccgggtggaccctcggctgcatacacctatgtacttcctgctgtctcagctgagcctgatggatctgatgtacatcagcacaaccgtgcctaagatggcttttaacttcctatccggccagaaaggcatttctttcctcggatgtggcgtgcagagcttcttcttcctgaccatggcctgcagcgagggcctgctgctggctagcatggcctacgacaggtacgtggccatctgccaccccctgcactaccccatcagaatgtccaagatgatgtgcgtgaagatgatcatcggctcttggatcctgggcagcatcaattcgctggctcacaccgtgtatgccctgcacatcccctactgcagatccagagccatcaaccacttcttttgcgacgtgcctgccatgctgcctctggcttgtatggacacctgggtctacgagtacatggtgttcgtcagcacgagcctgttcctgctcctccccttcctgggaatcacagccagctacggcagagtgctgtttgccgtgtaccacatgcggtccaaagagggcagaaagaaggccttcaccacctgcagcacccacctgacagtggtgaccttctactacgcccctttcgtgtatacatacctgagacctagaaacctgcgatctccagccgaggataagatcctggccgtgttctacaccatcctgacccctatgctgaaccccatcatctacagcctgcggaacaaggaagtgctgggcgccatgaccagagttttcggcatcttcagcagcctgaaggaatga

SEQ ID NO: 276 - DNA, 939 bp, Artificial Sequence
  OR2M2 consensus-c
atggcctgggagaaccagacattcaatagcgatttcatcctgctcggaatcttcaaccacagcccacctcatatcttcctgtttagcctggtgctgggaatctttaccgttgctttcatgggcaacaccgtcatggtgctgctgatctatctggatacacaactgcacacccctatgtacttcctgctctctcagctgtccctgatggacctgatgctcatttgtaccacagtgcctaagatggcctttaattacctgtctggcagaaagagcatcagcatggccggctgtgtgacccagatcttcttctacgtgtccctgctgggtgctgaatgcttcctgctggccgtgatggcttacgacagatacgtggccatttgtcaccctctgaggtacaccaacctgatgaacccaaagatctgcggacttatggccacaagctcttggatcctgggctctacagacggcatcatcgacgtggccgccacactgtccttcagctactgcggcagtagagagatcgcccacttcttctgcgacgtgcccgccctgctgatcctgagctgtacagatacctccatctttgaggaagtgatcttcatctgctgcgtggtgatgctgctgttccctgtggccattatcatcgccagctacgccagagtgatcctggccgtgatccacatgggcagcggcgagggccggtgcaaggccttcaccacctgcagcagccacctgatggtggtgggcatgtattacggcgccgctatgttcatctacatgcggcccaccagcgaccactctcctacccaggacaagatggtcagcgccttttacaccatcctgacccctatgctgaaccccctgatctacagcctgcggaacaaggaagtggctagagccttcatgaaaatcctgggcaagggcaaaagcgagagctga

SEQ ID NO: 277 - DNA, 936 bp, Artificial Sequence
  OR2M4 consensus-c
atggtctggcggaaccagaccttcaacagcgacttcatcctgctcggaatcttcgaccactctccaacccacacattcctgttcagcctggtgctgggcatctttaccgtggccttcatgggcaacaccgccatggtgctgctgatctacctggatacacagctgcacacacccatgtacttcctgctgagccagctgtctctgatggacctgatgcttatttgtacaaccgttcctaagatggcctttaattacctgagcggcagaaaaagcatcagcctcgccggatgtggcacccaaatcttcttctacgtgtctctgctgggagccgagtgcttcctgctggccgtgatggcctacgacagatacgtcgctatctgccaccctctgagatacacaatcctgatgaaccagaagctgtgcgtgctgatgactgtggctagctggatcctgggctctctggacggcatcatcgtgctggctgctgtgctctccttcagctactgcagcagcctggaaatccaccacttcttctgcgacgtggccgcactgctgcctctgtcctgcaccgacaccagcgccttcgagagactgctgtttatctgctgcgtggtcatgctgatcctccccgtgtccgtgatcatcctgtcttatagccacgtgctgcgggccgtgatccacatgggatctggcgagagccggagaaaggccttcaccacctgtagcagccatctgagcgtggtgggcctgtactacggcgccgccatgttcatgtacatgcggcctgccagcaagcacacccctgatcaggataagatggtgtccgccttttatacaatcctgacccctatgctgaaccccctgatctacagcctgagaaataaggaagtgtccagaggcctgcagaaactgctgcgcaagggcaagctgatttga

SEQ ID NO: 278 - DNA, 957 bp, Artificial Sequence
  OR2T1 consensus-c
atggaagagtacaacaccagcagcaccgatttcacattcatgggcctgttcaacagaaaggaaaccagcggcctgctgtttgccatcatcagcatcatctttttcactgccctgatggccaacggcgttatgatcttcctgatccagacagatctgagactgcacacacctatgtacttcctgctctctcatctgtctttcatcgacatgatgtacatcagcacaatcgtgcctaagatgcttgtggactacctgctgggccagcggaccatctccttcgtgggatgtaccgctcaacacttcctgtacctgaccctggtgggcgccgagttcttcctgctgggcctgatggcctacgacagatacgtggccatttgcaatcctctgcggtaccccgtgctgatgtcccggcgggtgtgttggatgatcatcgccggaagctggttcggcggatctctggacggcttcctgctgacacctatcaccatgagctttccattctgtaatagcagggaaatcaaccactttttctgcgaggcccctgctgtgctgaagctggcctgcgccgatacagccctgtacgagacagtgatgtatgtgtgctgcgtgctgatgctgctgattccatttagcgtggtgatcgccagctacgccagaatcctgaccaccgtgcacagaatgagctctgtggagggcagaaaaaaggccttcgccacctgcagcagccacatgaccgtggtcaccctgttctacggcgccgctatgtatacctacatgctgcctcacagctaccacaagcccgcccaggacaaggtgttcagcgtcttttacaccatcctgacacctatgctcaaccccctgatctactccctgcgcaacaaggacgtgaccggcgctctgaaaagagccctgggaagattcaagggcccccagagagtgtccggcggcgtgttctga

SEQ ID NO: 279 - DNA, 963 bp, Artificial Sequence
  OR2T4 consensus-c
atggccaatatcacatggatggccaaccataccggctggtccgacttcatcctggtgggcctgtttcggcagagcaagcaccccgctctgctctgcgtcgtgatctttgtggtctttctgatggctctgtccggcaacgccgtgctgatcctgctgatccacagcgatgcccacctgcacaccccaatgtacttcttcatcagccagctgagcctgatggacatgatgtatatcagcgtgaccgtgcccaagatgctgcttgatcaagtgatgggagtgaacaagatttctgcccctgaatgcggcatgcagatgttcctgtacgtgacactggccggcagcgagttctttctgctggctaccatggcctacgatagatacgtggccatctgccaccctctgcggtaccctgtgctgatgaaccacagagtgtgcctgttcctggccagcggatgttggttcctgggatctgtggacggcttcacatttacacctatcaccatgaccttccccttctgcagaagcagagagatccaccacttcttctgtgaagtgcctgccgtgctgaagctgagctgcagcgacacctctctgtacgagatcttcatgtatctgtgctgcgtgctgatgctgctgattcccgttacagttatctctagcagctacctgttcatcctgctcaccatccaccggatgaacagcgccgaaggcagaaagaaggccttcgccacctgttccagccacatgacagtggtgatcctgttctacggcgccgctatctacacctacatgctgccttctagctaccacacccctgagaaggacatgatggtgtccgtgttctacaccatcctgacccctgtgctgaaccccctgatctacagcctgaggaacaaagacgtgatgggcgccctgaaaaagatgctgaatgtcggccctgtgttccaggagacaatgaagtga

SEQ ID NO: 280 - DNA, 963 bp, Artificial Sequence
  OR2T5 consensus-c
atggccaacatcacatggatggcaaaccacaccggcaagtccgatttcatcctggtgggactgttctctcaaagcaagcaccctgccctgctgtgcgtggtgatcttcgtggtctttctgatggccctgtctggcaacgccatcctgatcctgctgattcacagcgacgcccacctgcacacacctatgtacttctttatcagccagctgagcctgatggatgtcatgtacatcagcgtcaccgtccccaagatgctgatggaccaggtgatgggcgtgaacaagatctccgcccctgagtgcggcatgcagatgttcctctacctgaccctggccggaagtgagttcttcctgctggctgctatggcctacgacagatacgtggccatctgccaccccctgcggtaccccgtgctgatgaatcacagagtttgtctgctgctggccagcggctgctggttcctgggcagcgtggacggcttcatgctgacccctatcaccatgacattccccttctgcagaagcagagagatccatcacttcttctgtgaagtgccagccgtgatgaaactgagctgcagcgacaccagcctgtacgagacactgatgtatctgtgctgcgtgctgatgctactgatccctgtgaccgtgatcagctcttcttacagcttcatcctgctgaccatccatcggatgaacagcgccgagggcagaaagaaagccttcgctacctgtagctcccacatgaccgtggtgatcctgttttacggcgccgccgtgtacacctacatgctgcctagcagctaccacaccccagaaaaggatatgatggtgtccgtgttctatacaatcctgacccctgtgctgaatcctctgatctacagcctccggaacaaggacgtgacaggagctctgaaaaagatgctgaacgtgggctctgtgtttcaggagacaattaagtga

SEQ ID NO: 281 - DNA, 948 bp, Artificial Sequence
  OR2T6 consensus-c
atggacggcaacaacgagacactgagcagcgacttcaccctgatgggactgtttacccacaacaaggcctctggcttcctgttcagcgtgatttgtgccatcttcttcatggccatgatcgctaatggcgtgatgatctttctgatccacatcgatcctcacctgcacaccccaatgtatttcctgctgtctcacctgagcttcatcgacatgatgtacatcagcaccatcgtgcctaagatgctggtggactacctggttggcaagggcaccatctccttcatcgcctgcaccgcccagtacttcctgtacatgggattcgtgggcgccgagttcttcctgctcggcctgatggcctatgatagatacgtggccatctgcaaccctctgcggtaccctgtgctgatgagctggcgggtgtgctggatgatcctggccagcagctggttcggcggcgccctggacagcttcctgctgacaccaatcaccatgtctctgcctttctgcgcctctcataagatcaaccacttcttttgcgaggcccctacaatgctgaggctggcctgtggcgacaaggccgcctacgagatggtcatgtacgtgtgctgcgtggccatgctgctgatccccttcagcgtggtgatcgccagctacgccagaatcctgattacagtgcaccagatgaaaagcgccgaaggtaaaaagaaagcttttgccacctgctctagccacatgatggtggtcacccttttttacggcgctgctctgtacacctacatgctcccccagtcctaccacacccccatcaaggacaaggtgttctccgccttctacacaatcctgacccctctgctgaaccccctgatctacagcctgcggaatagagatgtgatgggcgcactgaagagagtgctggctagaggcgcttgtggagtgacaagagaatga

SEQ ID NO: 282 - DNA, 954 bp, Artificial Sequence
  OR2T7 consensus-d DNA
atggaatggggcaactacagcatgtacgccgatttcgtgctgctgggactgtttagcaataccagattcccttggctgctgttcgccctgatcctgctggtgttcgtgatcagcatcgcctctaataccgtgatgatcatcctgatccacatcgatagccggctgcacaccccaatgtacttcttgctgagccagctgagcctgatggacatcctgtatatctcaacaatcgtgcctaagatgctggtcgaccaggtcatgggccagagagccatttcctttgccggctgcacagcccagcatttcctgtacctgacactggccggagccgagttcttcctgctgggactgatgagctacgacagatacgtggccatctgcaaccctctgagataccccgtgctgatgtctagaaaagtgtgcctgctgatcgtggccgccgcttggctgggcggcagcatcgacggcttcctgctgacccctgtgaccatgcagttccccttctgcgcctcccgggaaatcaaccacttcttttgcgaggtgcccgctctgctcaagctgtcttgtaccgacaccagcgcctacgagacagccatgtacgtctgttgcatcatgatgctgctgattcctttcagcgtgatctctgcctcttatacaagaatccttatcaccgtgtacagaatgagcgaggccgaaggcagacggaaagccgtggctacatgcagcagccacatggtggtggtttccctgttctacggcgctgctatgtacacctacgtgctgcctcacagctaccacaccccagagcaagataaggccgtgagcgctttttacaccatcctgacccctatgctgaaccccctgatctacagcctgcggaacaaggacgtgacaggcgccctgcagaaggccctgggcaggtgtgtgtccagcggcaaggtgacgaccttctga

SEQ ID NO: 283 - DNA, 939 bp, Artificial Sequence
  OR2T8 consensus-c
atggaaaacggcaattacacatctgatttcatcctgcttggactcttcaaccacacacgggcccacctgttcctgttcgtgatggtgctgaccatcgtgttcaccagcctgttcggcaacgccctgatgatcctgctgatccaccaggaccacagactgcacacccctatgtacttcctgctgagccagctgtccctgatggacatgatgctggtgtccaccatcgtgcctaagatggccgccgattacctgacaggcagcaagtccatcagccctgccggctgcggcctccagatcttcttcttccttacactgggcggaggcgagtgcttcctgctggccgctatgtcttatgacagatacgtggccgtgtgccaccctctgcggtaccccaccctgatgagctggcaactgtgcctgcggatgaccctgggctcttggttcctgggcgctgctgacggtctgatgcaggccgctgccacactgtcttttccattctgtggagctcacgaaatcgaccacttcttttgtgaagcccctaccctggtcagactggcatgcgccgacacctctgtgttcgagtacgtgatgtacatctgttgcgtgctgatgctgctggtgcccttcagcctgatcctgtctagctatagcctgattctggccgccgtgctgcacatgcggagcaccgaggccagaaagaaagccttcgccacctgtagcagccatctggccgtggtgggcctgttttacggcgccgctatcttcacctacatgagacctaaaagctacagaagcgccaatcatgataaggtggtcagcgccttttacaccatctttacacctctgctgaaccccctgatctacagcctgagaaacagcgaggttaagggcgccctgcgcaagtgcatgggccagtgcgtggccctgtcccacgagtga

SEQ ID NO: 284 - DNA, 963 bp, Artificial Sequence
  OR2T12 consensus-c
atggaaatgagaaacaccaccagcgacttcatcctgctgggactgttcaaccacaccagagctcacctgttcctgtttatgatggtgctggctacagccctgaccagcctgttcggcaatgccctgatgatcctgctcatccacctggaccacaggctgcacagacctatgtacttcctgctgtctcagctgtctctaatggacatgatgctggtctccaccatcgtgccaaagatggccgccgactacctgaccggcaacaaggccatcagccgggccggttgtggcctgcaaatcttcttcctgctcacactcggcggaggcgagtgcttcctgctggccgccatgagctacgatagatacgtggccgtgtgccaccccctgagatatcctgttctgatgagctggcagctgtgcctgagaatgaccctgggcagctggttcctgggcgccgccgacggcctgatgcaggccgccgctacactgtccttccctttctgcggagcccacgagatcgaccatttcttttgtgaagcccctgtgctggtgcggctggcatgcgccgatacatctgtgttcgagaacgccatgtacatctgctgcgtgctgatgctgctggtgcccttcagcctgattctgagcagctacggcctgatcctggccgctgtgctgctgatgcgcagcaccgaggccagaaagaaagcctttgccacatgcagctctcacctggccgtggtcggcctgttttacggcgccgcaatcttcacctacatgcggcctaagagctatagaagtgctaatcatgataaggtggtgtccgccttctacaccatctttacacctgtgctgaaccccctgatctacagcctgcggaacagcgaggtgaaggaagctctgaaaaagtggctgggcacctgtgtgaacctgaagcaccagcagaacgaggcccaccggagcagatga

SEQ ID NO: 285 - DNA, 954 bp, Artificial Sequence
  OR2T27 consensus-c
atggaatggggcaactacagcatgtacgccgatttcgtgctgctgggactgttcagcaacaccagattcccttggctgctgtttgctctgatcctgctcgtgtttgtgatctccatcgccagcaataccgtgatgatcatcctgattcacatcgacagtcggctgcacacacctatgtacttcctgttgtctcagctgagcctgatggacatcctgtacatcagcacgatcgtccctaagatgctggtggaccaagtgatgggccagagagccatcagcttcgccggatgtaccgcccagcacttcctgtacctgaccctggccggcgccgagttcttcctgctgggcctgatgagctacgacagatacgttgccatctgcaatcctctgcggtaccccgtgctgatgagccggaaggtgtgtctgctgatcgtcgccgctgcctggctgggcggaagcatcgatggcttcctgctgacccctgtgaccatgcagttccccttctgcgcctctagggaaatcaaccactttttttgcgaggtgcccgccctccttaagctgagctgcaccgacaccagcgcctacgagacagccatgtatgtgtgctgcattatgatgctgctgatccctttcagcgtgatctctgcaagctataccagaatcctgatcacagtgtacagaatgagcgaggccgagggccggagaaaggctgtggctacatgttctagccacatggtggttgtgtccctgttctacggcgccgccatgtacacatacgtgctgcctcactcctaccatacaccagaacaggataaggccgtgtccgccttctacaccatcctgaccccaatgctgaaccccctgatctacagcctgagaaacaaagacgtgacaggcgctctgcagaaagccctgggcagatgcgtgtctagcggcaaggtgaccaccttctga

SEQ ID NO: 286 - DNA, 963 bp, Artificial Sequence
  OR2T29 consensus-c
atggctaatatcacctggatggccaaccacacaggcagatctgacttcatcctggttggcctgttcagccagagcaagcaccctgccctgctgtgtgtggtcatcttcgtggtgttcctgatggctctgtctggcaacgccattctgatcctgctgatccattctgatgcccacctgcacacccctatgtacttcttcatctcccagctgagccttatggatgtgatgtatattagcgtgaccgtgcctaagatgctgatggaccaagtgatgggcgtgaacaagatcagcgcccctgagtgcggaatgcagatgttcctgtacctgaccctggccggctctgagttcttcctgctggcagctatggcctacgacagatacgtggccatctgccaccccctgagataccctgtgctgatgaatcaccgggtgtgcctgctcctggtcagcggctgctggttcctgggcagcgtggacggcttcatgctgacaccaatcaccatgacattccctttctgcagaagccgggaaatccaccacttcttttgtgaagtgcccgccgtgatgaaactgagttgcagcgataccagcctgtacgagactctgatgtacctgtgctgcgtgctgatgctcctgatccccgtgaccgtgatcagctccagctattcttttatcctcctgacaatccatagaatgaactccgccgagggcaggaagaaggccttcgccacatgtagcagccacatgaccgttgtgatcctgttttacggcgccgccgtgtacacctacatgctgcctagcagctaccacaccccagaaaaggacatgatggtgtccgtgttctacaccatcctgacccccgtgctgaaccctctgatctacagcctgcggaacaaggacgtgacaggagctctgaagaaaatgctgaacgtgggatctgtctttcaggagacaatcaagtga

SEQ ID NO: 287 - DNA, 963 bp, Artificial Sequence
  OR2T33 consensus-c DNA
atggaaatgcggaacaccaccagcgacttcattctgctgggcctgttcaaccacaccagagcccacctgtttctgtttatgatggtgctgacaatcgccctgacttctctcttcggcaacgccctgatgatcctgctgatccactgggaccacagacttcatacccctatgtacttcctgctgagccagctgtccctgatggacatgatgctggtctctacaatcgtgccaaaaatggccgccgattacctgaccggcagcaagagcatcagccctgccggctgtggcctgcagatctttttcctgctgaccctgggcggcggcgaatgcttcctgctggccgctatgtcttacgacagatacgtggccgtgtgccaccccctgagatatcctacactgatgagctggcaactgtgcctgcggatgacaatgggatcttggttcctgggagctgctgatggcctgatgcaggccgccgccacactgagctttcccttctgcggcgctcacgagatcgaccacttcttctgtgaagcccctgtgctggtgcggctggcctgcgccgacaccagcgtgttcgagaacgtgatgtacatctgctgcgtgctgatgctgctcgtgcctttcagccttattctgtccagctacagcctgatcctggctgctgttctgcacatgcgcagcaccgaggccagaaagaaagcctttgccacctgtagcagccacctggccgtggtcggactgttctacggcgccgctatcttcatctacatgagacctaagtcctatagatctgccaatcatgataaggtggtgtccgccttctacaccatcttcaccccactgctgaaccccctgatctacagcctgagaaatagcgaggtgaagggcgccctgaagcggtggctgggaacatgcgtgaacatcaagcaccagcagaacgaggcccaccggagcagatga

SEQ ID NO: 288 - DNA, 969 bp, Artificial Sequence
  OR2T34 consensus-c
atgtgcagcggcaatcaaacaagccagaaccagaccgccaccgacttcatcttggtgggcctgttcggcgagaccaagcacgccgctctgctgtacaccgtgacattcatcttcttcctgatggccctggccggaaacgccctgctgattctgctgatccacagcgagccaagactgcacacacctatgtacttcttcatctctcagctgtctctgatggatctgatgtacatcagcgtgacagttcctaagatgctggtgggccaggtcaccggcgatgacaccatcagccctagcggctgtggcatccagatgttcttctacctgaccctggccggcgccgaggtgttcctgctggcagctatggcctacgaccggtacgccgccatctgcagacctctgcattaccccctgctcatgaaccaaagagtgtgccagctgctggtgagcggatgttggttcctgggaatggtggacggcctgctgctcacccctatcaccatgagctttccattctgtcagagcagaaagatcctgtccttcttttgcgaggcccctgccctgctgaagctgagctgcagcgacatcagcctgtacaagatgctgatgtacctgtgctgcgtgctgatgctgctgattcccatcatggtcatctccagctcttatgccctgatcctgcacctgatccacagaatgaacagcgccgaaggcaggcggaaagcctttgccacatgctctagccacatgatcgtggtgctgctttttttcggcgccagcatctatacatacatgctcccctctagctaccacaccgctgaacaggatatgatggtgtccgccttctacaccatcatcacccctgtgctgaaccccctgatctactccctgcggaacaaggacgtgaccggagctctgagaagcatgatgcagagcggcatgaatctgagaaaagtggtgaagggcaagtga

SEQ ID NO: 289 - DNA, 969 bp, Artificial Sequence
  OR2T35 consensus-c
atggaaggcctgctgcagaactcgacagatttcatcctgctgggcctgatcacccaccccgctttcccaggcctgattttcgccgtggttttcagcatcttcgtggtggccgtcaccgcgaatgtggtgatgatcctgctgatccacgtggacagccggctgcacacccctatgtatttcctgctgagccagctgagcatcatggacaccgtgtacatctgcatcacagtgcctaagatgctgcaggacctgctcagcaaggaaaaaaccatctcttttctgggttgtgccctgcaaattttcctgtacctgaccctgattggaggcgagttcttcctgctgggcctgatggcctacgacagatacgtggccgtgtgcaaccctctgcggtaccctttgcttatgaatagacggatctgtctgttcatggtggtgggcagctgggtcggcggaagcctggacggcttcatgctgacacctgtgaccatgagcttcccctactgcggcagcagggagatcaaccacttcttctgcgagatcccagccgtgctgaagctgagctgcaccgatacaagcctgtacgagacactgatgtacgcctgctgcgtgctcatgctgcttatccccatcagcgtgatctccgtgtcctacaccagaatcctgctgaccgtgcacagaatgaacagcgctgaaggcagaagaaaggcctttgccacatgttctagccacatcatggtcgtcagcatcttttacggcgccgccttctacaccaacgtgctgcctcattcttaccacacacctgagaaggacaaggtggtgtctgccttttataccatcctgacacctatgctgaaccccctgatctacagcctgcgcaacaaggatgtggccgctgctctgcggaaggtgctgggcagatgcggctcctctcagagaatcagagtggccaccgtgatccggaaaggatga

SEQ ID NO: 290 - DNA, 921 bp, Artificial Sequence
  OR2AK2 consensus-c
atgaaaacaggaaatcagtcattcggcaccgatttcctgctcgtgggcctgttccaatacggctggatggacagcctgctgtttgtggtcatcgccatcctgttcaccgtggctctgaccggcaacatcatgctgatccacctgattagactggacaccagactgcacacccctatgtatttcctgttgtcccagctgagcatcatcgacatgatgtacatcagcacaacagtgcccaagatggccgtcaacttcctttcccagagcaagacaatcaccttcctgggctgcgaaatccagaccttcgtgttcctggctctgggcggaaccgaggccctgctgctgggcttcatgtcttacgacagatacgtggctatctgtcaccctctgcattatcctgtgctgatgtccaagaaaatctgctgcctgatggtcacctgcgcctgggcctctagcagcatcaatgccctgatccacacactgtacgtgtttcagctgcctttttgtagaagccggctgatcaaccacttcttctgcgaggtgcctagcctgctgcctctggtgtgccaggatacaagccaatacgagtacaccgtgctgctgagcggcctgatcatcctgctgctccccttcctggccatcctggccagctacgccagagtgctgatcgtggtgtttcagatgagcagcggcaagggccaggccaaggccgtgtccacatgtagcagccacctgatcgtggccagcctgttttacgccacaaccctgtctacctacactagaccccacagcctgcactctccatctcgcgacaaggtggtggctgttttctacaccatcattacccctctgctgaaccccttcatctacagcctgcggaacaaggaagtgaccggcgccgtgcggagactgctgggatga

SEQ ID NO: 291 - DNA, 936 bp, Artificial Sequence
  OR4D10 consensus-c
atggaaatgaaaaactgcaccagagtgaaggagttcatctttctgggccttacacagaaccaggaggtgtccctggtgctgttcctgttcctgctcctggtgtacgtgaccacactgctgggcaacctgctgattatggtcaccgtgacatgcgagagcagactgcacacccctatgtacttcctgctgcggaatctgagcatcgccgatatctgctttagcagcattaccgcccctaaggtgctggtcgacctgctgagcgagagaaagaccatctccttcaacggatgttttacccagatgttcttctttcacctgatcggaggcgtggacgtgttcagcctgtctgtgatggccctagatagatacgtggccatctctaagcctctgcactacgttaccatcatgagccggggcaggtgtatcggcctgatcgtggctagctgggtcggcggcttcgtgcacagcatcgtgcagatctccctgctgctccccctgcccttctgcggacctaacgtgctggacaccttctactgcgacgtgcctcaggtgctgaaactggcctgcaccgacatcttcatcctggaactgctgatgatcagtaacaacggcctgctgacaaccctgtggttcttcctgctgctggtgtcctacatggtgatcctgtctctgcttagaagccaggccggcgagggcagaagaaaggctatcagcacctgtacaagccacatcaccgtggtgacacttcatttcgtgccatgcatctatgtgtacgcccggcctttcaccgctctgccaacagataaggccatcagcgtgacttttacagttatctctcctctgctgaaccccctgatctacaccctgagaaatcaagagatgaaaagcgccatgcggcggctgaagcggagactggtgcccagcgacagaaagtga

SEQ ID NO: 292 - DNA, 939 bp, Artificial Sequence
  OR4E2 consensus-c
atggacagcctgaaccagaccagagtgaccgagttcgtgttcctgggcctgaccgacaactgggtgctggaaatcctgttcttcatggctttcagcgccatctacgtgctgaccctgctgggcaacatcctgatcatcgtgacaatcgtgttcacccctagactgcacacccctatgtacttcttcctgagcaacctgagcttcatcgacatctgtcacagcagcgtgaccgtgcccaagatgctggagggcctgctgctggagagaaaaaccatttcttttgataattgcatcgcccagctgttcttcctgcacctctttgcctgtgccgagatctttctgctgaccatcatggcctacgacagatacgtggccatttgtacacctctgcattatccaaatgtgatgaacatgcgggtgtgcgtgcagctggtgtttgccctgtggctgggaggcaccgtgcacagcctggttcagacattcctcaccatcagactgccttactgcggccccaacatcatcgatagctacttctgcgacgtgccacctgtgatcaagctggcctgcacagatacatacctgacaggcatgctgatcgtttccaacagcggcacaatctctctgacatgcttcctggccctggtcaccagctataccgtgatccttgtgagcctgagaaagcaatctgctgagggaagaaggaaggccctgtccacctgcagcgcccacttcatggtggtcgccctgttcttcggcccttgcatcttcatctacacccgccccgacacctcttttagcatcgacaaggtggtgtccgtgttctacacagtcgtgacacctctgctgaaccccctgatctacaccctgcggaacgaggaagtgaagagcgctatgaaacagctgcggcagagacaggtgttctttaccaagtcctactga

SEQ ID NO: 293 - DNA, 918 bp, Artificial Sequence
  OR4F5 consensus-d DNA
atggtgaccgagttcatcttcctcggcctgtctgattctcaagagctgcagatcttcctgttcgtgttctttttcgtgttttatgtgggcatcgtctttggcaacctgctgatcgtgattacagtggtgtccgacagccacctgcacagccctatgtacttcctgctggccaacctgagcctgatcgacctgtgcctgtccagcgtgaccgcccctaagatgatcgccgacttcttcagcaaacggaaggtgatcagcttcaagggatgtctggcccagatcttcctgctgcatttcttcggcggcagcgaactggtgatcctgatcgccatggccttcgaccggtacgtggccatctgcaagcccctgcactacaccaccatcatgtgcggaaacgtgtgcgtgggaatcgtggctgctgcctggggcatcggcttcctgcactctgtttcccagctggctttcgccgtgaacctgcccttctgcggccccaacgaagtggacagcttctactgcgacctgcctagagtgataaagctggcatgcaccgatacatacagactggacatcatggtcattgccaacagcggcgtgctgacagtgtgttcttttgtgctgctgattatcagctacaccatcatcctgatgaccatccagcacagacctagcgatagaagcagcaaggccctgagtacactgaccgcccacatcacagtggtcctgctgtttttcggcccatgtatctttatctacgcctggcctttccccatcaaaagcctggataagttcctggctgtgttctacagcgtggtgacacctctgcttaatcctatcatctacaccctgcggaacaaggacatgaaaaccgccatgagaaggctcagaaagtggaacgccaatagctctgtgaagtcctga

SEQ ID NO: 294 - DNA, 936 bp, Artificial Sequence
  OR4K1 consensus-c
atggctcacaccaacgagagcgttgtgtccgagttcgtgctgctgggactgagcaatagctgggagctgcagctgttcttcttcgccatctttagcatcgtctacgtgaccagcgtgctgggcaacatcatgatcatcgtgatcatcagcagcgacagccacctgaactcccctatgtacttcctgctctctaacctgagctttatcgacatctgccagagcaacttcgccacacccaagatgctggtcgacttcttcgtggaacacaagaccatctctttcgagggctgtatggctcagatcttcctgctgcactcttttgtgggctctgaaatgatgctgctggtcgccatggcctacgatagattcatcgccatttgtaaacccctgcactacagcacaatcatgaaccggaggctgtgcatcattttcgtgtccattagctgggccgtgggaatccttcattctgtgtctcacctggccttcaccgtggatctgcccttctgcggcccaaacgaagtggacagcttcttttgcgacctgcctctggtgatcgagctggcctgcatggacacctacgagatggaaatcatgacactgacaaactctggcctgatcagcctgtcatgcttcctggctctgatcatcagctacaccatcatcctgattaccgtgcggagaagaagctctagcggcagcagcaaggccctgtccaccctgaccgcccacatcaccgtggtgatcctgtttttcggcccttgtatctatttttacatctggcctttcagcagactcagcgtggataagttcctgtccgtgttctacacagtgtgcacccctctgctgaatcctatcatctacagcctgagaaatgaggacgtgaaaagcgccatgagaaagctgcggaacagacacgtgaacagctggaagaactga

SEQ ID NO: 295 - DNA, 942 bp, Artificial Sequence
  OR4K2 consensus-c
atggacgtgggcaacaaaagcaccgtgtccgagttcgtgctgctgggcctgagcaacagctgggaactgcagatgttcttcttcatggtctttagcctgttttacgtggccaccatggtgggcaatagcctgatcgttatcaccgtgatcgtggacagccacctgcactctcccatgtacttcctgctgaccaacctgtctatcatcgacatgtctctggctagctttgctacacctaagatgatcacagattacctgaccggccacaagaccatcagcttcgacggctgcatcacccagatcttcttcctgcatctgttcaccggtacagagatcattctgctcatggccatgagctttgatagatacatcgccatctgcaagcctctgcactacgccagcatcatcagcccccaagtgtgcgtggccctggtcgtggcttcttggatcgtcggcgtgatgcacagcatgtcccaggtgattttcgccctgacactgccattctgtggccctaacgaagtggactcctttttctgcgacctgcctgtggtgtttcagctggcctgcgtggacacctacgtgctgggactcttcatgatcagcacaagcggcatcatcgccctgtcatgtttcatcctgctgttcaacagctacgtgattgtgctggttacaatcaagcaccacagctctagaggcagcagcaaggccctgtccacctgcaccgcccacttcatcgtggtgttcatgttcttcggaccttgtatcttcatctatatgtggcccctctccagcttcctggtggataagatcctgagcgtgttctacaccatctttacacccatcctgaatcctatcatctacaccctgcggaaccaggaggtgaaaaccgccatgcggaagctgaagaacagattcctgaacttcaacaaggccatgccttga

SEQ ID NO: 296 - DNA, 972 bp, Artificial Sequence
  OR4K5 consensus-c
atggacaagagcaacagcagcgtggtttctgagttcgtgctcctgggcctgagctctagccaggagctgcagctgttcttcttcgtgttcttcagcgtgctgtacgtggtgatcgtgctgggaaatctgctcatcatccttacagtgacctctgatacatctttacattctccaatgtacttcctgctgggcaatctgagcttcgtggacatctgccaggccagctttgccacacctaagatgatcgccgacttcctgagcgaacacaagaccatcagctttagcggctgcatcgcccagatcttttttatccacctgtttacaggcggagagatggtgctgctggtgtctatggcctacgacagatacgtcgccatttgtaaacctctgcactacgtggtgatcatgagcaggcggacctgcaccgttctggtcatgattagctgggccgtgggcctggtccacaccctgagccaactgtccttcaccgtgaacctgcccttctgcggccctaacgtcgtggatagcttcttctgcgacctgcctagagtgaccaagctggcctgcctggacagctacatcatcgagatcctgatcgtggtgaacagtggcatcctgtctctgtccaccttcagcctgctggtgtccagctacatcatcatcctggtgacagtgtggttcaagtccagcgccgccatggccaaggccttcagcaccctggctgctcacatcaccgtggtgatcctgttctttggcccatgtatcttcatttacgtgtggccctttacaacataccccgtggacaagttcctggccatcttctacaccgtgttcacccctatcctgaaccccatcatctatacactgcggaacagagatatgaaagctgctatgagaaagatcgtgacccactacctgagacctaagaaaatcagcgagatgcctctggtggtgcggaccagcctgtattga

SEQ ID NO: 297 - DNA, 948 bp, Artificial Sequence
  OR4K17 consensus-c
atggaaagcatggaactgctgaaccagagccaagtgtctgagttcatcctgctgggactgaccagcagccaggacatccagttcctgctgttcgccctgttcagcgtgatctatgtggtgaccgtgctgggcaacctgctgatcgtggtgaccgtgtttaacacacccaacctgaatacccctatgtacttcctgctgggaaatctgagcttcgtggatatgaccctggcctcttttgccacccccaagatgatcctcaacctggtgaagaagcagaagaccatcagcttcgccggctgcttcacccagatcttcctgctgcacctgctgggcggcgtggagatggtgctgctggtctccatggcctacgacagatacgtcgccatttgcaagcctctgcactacatgacaatcatgaacaagaaggtgtgcgtgctgctggtggttacaagctggctgctgggactgcttcacagcggcctgcagatcccttttgtggtgaacctgccattctgcggccctaacgtggtggattccatcttctgtgacctgcctctggtgacaaagctggcttgcatcgacacctacttcgtgcagatcgtgatcgtggctaatagcggcatgatcagcctctcttgtttcatcatcttactgatcagctacagcctgatcctgattacaatcagaaaccacagctctacaggccagagcaaggcccggagcacactgaccgcccacattaccgtggtcatcctgtttttcggcccctgcatctttatctacatctggcctttctccaaccattctgttgataagttcctggctgtgttctacaccatcatcaccccaatcctgaaccctatcatctacaccctgagaaacaaagagatgaaaacagccatgaaaaagctgtggcgggccttcgtgaacagtagagaggacacctga

SEQ ID NO: 298 - DNA, 939 bp, Artificial Sequence
  OR4L1 consensus-c
atggacctgaagaacggctctctggtgaccgagttcatcctgctgggtttcagcggaagatgggaactgcagatctttttcttcgtgaccttcagcctgatctacggcgctacagtgatgggcaatatcctgatcatggtcaccgttacttttagcagcaccctgcacagccccatgtacttcctgctgggaaatctgagctttctggacatgtgcctgagcaccgtgacaacccctaagatgatcaccgacctgttgacagagcacaagacaatcagcgtgtggggctgtatggctcaaatgttcttcatgcacttctttggcggagccgaaatgacactgctgatcatcatggccttcgatagatacgtggccatctgcaagcctctgcactacagaaccatcatgagccacagactgcttaaaggcttcgtgatcctgagctggatcattggcttcatccacaccatgtcccagatggtgctgaccgtgaacctgccattctgcggccccaacgtgatcgacaacatcttttgcgacctgcctctggtcatcaagctggcctgcatcgagacatacaccctggaactgttcgtgatcgccgatagcggcctgctgagcttcatttgcttcatcctgctgctcgtgtcctacacagtgatcctggtgaccgtccccaagcggagctctggcggcctgagcaaggccctgtctaccctgtctgctcatatcatcgtggtgacacttttcttcggcccttgtatcttcatctacgcctggcctttttcatctttcgccagcaacaagaccctggccgtgttctacaccgtgattacccctctgctgaaccctatcatctatacactgcggaaccagaaaatgcaggaggccatgcggaagctgagattccagtacgtgtccagcgcccagaacttctga

SEQ ID NO: 299 - DNA, 942 bp, Artificial Sequence
  OR4M1 consensus-c
atggaacctgccaattacaccagagtgacagagttcgtgctgaccggtctgagccagacccgggaagtgcagctggtgctgttcgtgatcttcctgtctttttacctgttcatcctgcctggcaacatcctgatcatttgtacaatcagactggacccccacctgacaagccctatgtacttcctgctggccaacctggccttcctggatatctggtactctagcattacagccccaaagatgctggtcgacttcttcgtggaacggaaaatcatctctttcggcggatgtattgctcagctgtttttcctccatttcgtgggcgccagcgagatgttcctgctgaccgtgatggcctttgatagatacgccgctatctgtagacccctgcactacgccaccatcatgaacaggcggctgtgctgcatcctggtggccctgagctggatgggcggcttcatccacagcatcatccaggtggccctgatcgtgcggcttcctttttgcggccccaacgagctggacagctacttctgcgacatcacacaagtcgtcagaatcgcctgcgccaataccttccccgaggaactggtgatgatcttcagcagcggcctgatctccgtggtgtgcttcatcgccctgctgatgagttacgcttttctgctcgctatgctgaagaaacactctggcagcggagagtctaccagcagagccatgagcacatgctacagccacatcaccatcgtggtgctgatgttcggccctagcatctatatctatgcaagacctttcgacagcttctccctggataaggtggtgtccgttttccacaccgtgatctttccactgctgaaccctatcatctacaccctgagaaacaaggaggtgaagaccgccatgagaaagctggtgaaccggtacatcttgtgcaaggagaagtga

SEQ ID NO: 300 - DNA, 924 bp, Artificial Sequence
  OR4N2 consensus-c
atggaatctgaaaacagcacagtggtcaccgagttcatcctgctgggcttaacacagagcagagatatccagctgctggtgttcgtgctggtgctgatcttctacctgatcatcctgcctggaaatttcctgatcatcctgaccatccggagcgaccctggcctgacagcccctctgtacttcttcctgggcaacctggcctttctggacgcctcctacagcttcatcgtggctcctcgcatgctggtcgacttcctgagcgagaagaaagtgatcagctatagaggctgtatcacccagctgttctttctccatttcctgggaggaggcgagggactgctgctggttgttatggcctttgatagatacatcgccatctgccggcccctgcactacagcaccgtgatgaaccctagagcctgctacgcccttctgctggctctgtggctgggcggctttgtgcacagcatcattcaggtggccctgatcctgagactgccattctgcggccctaaccagctggataacttcttctgcgacgtgcctcaggtgatcaagctggcctgtacagacaccttcgtggtggaactgctgatggtgttcaacagcggcctgatgaccctgctctgcttcctgggcctgctggctagctacgccgtgattctgtgcagggtgcggggctcttcttccgagggcaagagcaaggccatgagcacctgtaccacccacatcatcgtgatcttcctgatgttcggccccggcatcttcatctacaccagacctttccgggctttccccgccgacaaggtggtgtccctgtttcacaccgtgatttttccactgctgaaccccgtgatctacacactgagaaaccaggaggtgaaggcctctatgaaaagactgttcaatcaacacatcgcctga

SEQ ID NO: 301 - DNA, 927 bp, Artificial Sequence
  OR4N5 consensus-c
atggaaacagagaactctacagtggtgaccgagttcatcctgctgggcctgacacagagccaggacgcccagctgctggtgtttgtgctggtgctgatcttctacctgattatcctgcccggcaatttcctgatcatcctgaccatccggagcgaccccggactgaccgcccctctgtacttcttcctgggaaatctggccttcctggatgctagctacagcttcatcgtggcccctcggatgctggtagacttcctgagcgaaaaaaaggtgatcagctacagaggctgcatcacccagctgtttttcctccatttcctgggcgccggcgagatgttcctgctggtcgtgatggccttcgatagatacatcgccatctgcaggcctctgcactactccaccgtgatgaaccctagagcctgttacgccctgctgctggccctgtggctgggcggcttcatccacagcatcgtgcaggttgctctgatcctgcacctgcctttttgcggcccaaaccagctggacaacttcttctgcgacgtgcctcaggtgatcaagctggcctgcaccgacaccttcgtggtggaactgctcatggtgtccaacagcggcctgctgacactgctgtgcttccttggacttctggcttcttatgccgtgatcctctgtagagtgaagggccactctagcgagggcaagtccaaggccatcagcacatgtacaacccacatcatcatcgtgttcctgatgttcggccctgctatctttatctacaccagacccttccgggcctttccagctgataaggtggtcagcctgttccacaccgtgatctttcctctgatgaaccccgtgatttacaccctgagaaaccaggaggtgaaagccagcatgcggaagctgctgtctcaacacatggtctgctga

SEQ ID NO: 302 - DNA, 948 bp, Artificial Sequence
  OR5A1 consensus-c
atgtccatcaccaaggcctggaatagcagctctgtgaccatgttcatcctgctgggcttcaccgatcaccctgagctgcaggccctgctgttcgtgaccttcctgggaatctacctggtgaccctggcttggaacctggccctcattttcctgatccggggcgacacccacctgcacacacctatgtacttctttctgagcaacctgtcttttatcgacatctgctacagcagcgccgtggcccctaagatgctgacagattttttctgggagcagaagaccatcagcttcgtgggctgcgccgcccagttcttctttttcgtgggcatgggactgaccgagtgcttcctgcttacagctatggcctacgacagatacgccgctatcagctccccactgctgtacaccgccatcatgagccaaggcctgtgcacaagaatggtggtgggcgcttacgtgggcggattcctgagctccctgatccaggcttctagcatcttcagactgcatttctgtggccctaacgtgattaaccacttcttctgcgacctgccccccgtgctggccctgtcatgcagcgacacctttctgagccaggtggtgaacttcctcgtggtggtgaccgtgggaggcaccagctttctgatcctgctgatctcttacggctacatcgtggccgccgtgctgaagatccctagcgccgaaggccggtggaaagccttcaacacctgtgccagccacctgatggtggttacactgctgttcggcacagccctgtttatgtacctgcggccttcttcctcttatagcctgggcagagataaggtggtcagcgttttctatagcctggtgatccccatgctgaatcctctgatctactctctgagaaacaaggaaatcaaggacgctctgtggaaggtcctggagaagaaaaaggtgttcagctga

SEQ ID NO: 303 - DNA, 927 bp, Artificial Sequence
  OR6F1 consensus-c
atggacaccggcaacaagaccctgcctcaggacttcatcctgctgggatttccaggatcacagacactgcagctgagcctgttcatgctgttcctggtcatgtacatcctgaccgtgagcggcaacgtggctattatcatgctggtgagcaccagccaccagctgcacacccctatgtacttcttcctgtgcaacctgagctttctggaaatttggtatacaaccgccgctgttcctaaggccctggccatcctgctgggcagaagccagactatctctttcaccggctgcctgcttcaaatgtatttcgtgttcagcctgggctgtaccgagtacttcctgctggccgccatggcctacgatagatacctggctatctgctaccccctgcactacggcgccattatgagctccctgctctccgctcagctggccctcggaagctgggtgtgtggcttcctggctatcgccgtgcccgccgccctgatcagcggcctgtctttttgcggtcctagagccatcaaccacttcttctgcgacatcgccccttggatcgccctggcatgcacaaacacccaggccgtcgagctggtggccttcgtgatcgccttcgtggtgatcctgggctcttgtctgatcaccctggtgtcctacatctacatcatcagcaccatcctgagaatccccagcgcctctggccggagcaaggcctttagcacatgcagcagccacctgaccgtggttctgatctggtacggctctacaatcttcctccatgtgagaacaagcatcaaggacagccttgatctgacaaaggccgtgcacgtgctgaataccgtggtgacacctgtgctgaatcctttcatctacaccctgcggaacaaagaggtgcgggaaaccctgctgaagaaatggaagggcaagtga

SEQ ID NO: 304 - DNA, 984 bp, Artificial Sequence
  OR6J1 consensus-c
atgggcaattggaccgccgccgtgaccgagttcatcctgctgggcttcagcctgtccagagaggtggaactgctgctgctggtgctgctgctgcctacattcctgctgaccctgctgggcaacctgctgatcatctccatcgtgctgagctgcagcagactgcacaccccaatgtacttcttcctgtgcaacctgagcatcctggacatcctcttcaccagcgtgatcagcccaaaggtgctcgccaacctgggcagcggagataagaccatctctttcgccggctgtatcacacagtgctacttttacttcttcctgggaacagttgagttcctgctgctcaccgtgatgagctatgacagatacgccgctatctgctgtcctctgcggtacaccaccatcatgagaccttccgtttgtatcggcacagtcgtgttcagctgggtcggcggatttctgagcgtgctgttccctaccatcctgatcagccaactgcctttctgcggatctaatatcatcaaccactttttttgcgacagcggccctctgctggctctggcctgcgctgataccacagccattgagctgatggacttcatgctgagcagcatggtgatcctgtgttgcatcgtgctggtagcctactcctatacctacatcattctgacaatcgtcagaatccccagcgccagcggcagaaaaaaggccttcaacacctgcgcctctcatctgaccatcgtgatcatttctagcggcatcaccgtgttcatctacgtgacacccagccagaaggaatacctggaaatcaacaagatcccctctgtgctgagctccgtggtgaccccttttctgaaccccttcatctacacactgaggaacgacactgtgcagggcgtgctgcgggatgtgtgggtgcgggtgcgcggcgtgctggagaaaagagccgtgcttagaagccggctgtcttccaacaaggaccactga

SEQ ID NO: 305 - DNA, 930 bp, Artificial Sequence
  OR7A10 consensus-c
atgaaaagctggaacaacaccatcatcagcgagttcctgctgctgggtctttctgaggagcctgagctgcagcctttcctgttcggcctgtttctgagcatgtatctggtcacagtgctcggaaatctgctgatcatcctggccacaatctccgatagccacctgcacacccctatgtatttttttctgagcaacctgtcttttgtggacatctgcttcaccagcacaacagtgcctaagatgctggtgaacatccagacacaatctaaggtgattacctacgccggctgcatcactcagatgtacttcttcctgctgttcgtgggcctggacaacttcctgctcaccgttatggcctacgacagattcgtggccatctgtcaccccctgcactacatggtcatcatgaaccctagactgtgcggcctgctggtgctggctagctggatcatgagcgtgctgaacagcctgttgcagagcctgatggtgctgccactgagcttctgcacccacctggaaatcccccacttcttctgtgaactgaaccaggtggtgcacctggcctgcagcgacaccttcctgaatgatatcgtgatgtacttcgccgtggtgctgcttggaggcggcccactgaccggcatcctgtacagctacagcaagatcgtgtcctccatccgggccatttcttctgcccagggcaagtacaaggccttcagcacctgtgcctctcatctgagcgtggtcagcctgttctacggcacctgcctgggagtgtacctgagctctgctgcaacccacaacagccacagcagcgccgctgccagcgtgatgtacaccgtggttacacctatgctgaaccccttcatctactccctgagaaacaaggacatcaagggcgccctgaagcggttctttagaggcaaacagtga

SEQ ID NO: 306 - DNA, 963 bp, Artificial Sequence
  OR7C2 consensus-c
atggaaagaggcaaccagacaggcgtgggcaacttcctgctgctcggcttcaccgaggatcctgatctgcagctgctacttttcggactgttcctgagcatgtacctggtgaccatcaccggcaatctgcttattatcctggctatcatctctgattcccacctgcacacacccatgtacttctttctgtctaatctgagcttcgccgacatctgcttcaccagcaccacaatccccaagatgctggtgaacatccagacccagagcaagatgatcaccttcgccggctgtctgagccaaattttcttcttcatcgtgttcggctgcctggacaacctgctgctcaccgtgatggcctacgacagattcgtggccatctgtcaccctctgcactacacagtgatcatgaaccccagactgtgcggcctgctggccctgggaagctggtgcatcagcgtgatgggctccctgctggagacactgactatcctgcggctgtctttttgcaccaatatggaaatccctcacttcttctgcgacctgcctgaggtgctgaagctggcctgcagcgacaccctgatcaacaacatcgtcgtgtacttcgtgaccatcgttctgggagtcttcccactgagcggcatcctgttttcatattctcagatctttagcagcatcctgagaatcagctctgctagaggcaagtacaaggccttctctacatgtggcagccatctgtccgtggtgagcctgttctacggcaccggcctgggcgtgtacctcagcagcgccgccaccccatctagcagaaccagcctggctgctagtgtgatgtacaccatggtgacacctatgctgaacccttttatctacagcctgcggaaccgcgacatgaaaggagccctgggaagactgctgctgcgggccacaagcctgaaagagggcaccatcgccaagctgagctga

SEQ ID NO: 307 - DNA, 939 bp, Artificial Sequence
  OR7G2 consensus-c
atggaacctagaaatcaaacagccgtgtccgagttcctgctgctgggactgaccgaggaccccgagctgcagcctctgctgttcagcctgttcctgagcatgtacctggtgaccatcctgggcaacctgctgattatcctggccgtgtcctctgatagccacctgcataccccaatgtacttctttctgtctaatctgtctttcaccgatatctgtctgagcaccaccacaatccctaagatgctggtgaacatccaggcccagaaccagagcatcacatacactggatgtctgacccagatctgcttcgtgctgttttttgccggactggaaaacttcctgcttgctgctatggcctacgatagatacgttgctatctgccaccctctgcggtatacagtgatcatgaatcctcggctgtgcggcctgctcatcctgcttagcctgctgatcagcgtggtgaacgccctcctccacagcctgatggtgctgagactgagcttctgcaccgacctggaaatccctcacttcttctgcgagctggctcaggtgatcaaactggcatgcagcgacaccctgattaacaacatcctgatctatttcgccgcctgcatcttcggcggaatccccctgtccggcatcatcttcagctacacacagatcgtgtccagcgtcctgagaatgcctagcgccggcggcaagtacaaggccttctctacctgtggcagccacctgagcgtggtcagcctgttttacggcaccggcctgggcgtgtacatctcctctgccgtgacagacagctctagaaagaccgccgtggcctctgtgatgtacagcgtggtgccacagatgatgaaccccttcatctacagcctgagaaaccgggacatgaaaggcgccctgaggaagctgatcggcagaatccccagcctgctgtga

SEQ ID NO: 308 - DNA, 939 bp, Artificial Sequence
  OR7G3 consensus-c
atgaaagccggcaatttcagcgacacccctgagttcctgctgctgggcctgagcgaggatcctgagctgcagcctctgctgtttatgctgttcctgtccatgtacctggtgaccgtgctgggaaatctgctgatcatcctggccatcaacagcgacagccacctgcacacccctatgtacttcttcttgtccaacctgtcttttgtggacatctgttttaccacaacaaccatccccaagatgctggtgaacatccagacccaaagcaagagcatcagctataccggctgtctgacacagatctgcttcgtgctggttttcgccggactggaaaacggcatcctggtcatgatggcctacgacagattcgtggccatctgccaccctctgcggtacaacgtgatcatgaaccccaaactgtgcggcctgctggtgctgctgagcttcctgatcagcgtgctggatgccctgctgcacacactgatggccctgagactgtccttttgcaccgacctggaaatcccccactttttctgcgagctggctcacatcctgaagctggcctgcagcgatatccttattaacaacatcctcgtgtaccttgtgaccagcctgctcggagtggtgcccctgagcggcatcatcttctcctacaccagaattgtgagttctgtcctgaagatcccatctgctggcggaaagtacaaggccttcagcatctgtggctctcatctgatcgtggtcagcctgttctacggcacaggcttcggcgtgtacctgtctagcgccgccacccacagctccagaaagtctgctatcgccagcgtgatgtataccgtggtgacaccaatgatgaatcctttcatctacagcctgcggaacaaggacatgctgggcgccctgagaaagctgattagccggatccctagcttccactga

SEQ ID NO: 309 - DNA, 957 bp, Artificial Sequence
  OR10G2 consensus-c
atgggcaagaccaagaacaccagcctggatacagtggtgaccgacttcatcctgctgggactgtctcacccccccaatctgcggaccctgctgttcctggtgtttttcatcatctatatcctgacccagctgggcaacctgctgatcctgctgaccgtttgggccgatcctaagctgcacgccagacctatgtacatcctgctcggagttctctccttcctggacatgtggctgagcagcgtcatcgtgcctagactgatcctgaacttcaccccagcctctaaagccatccccttcggcggctgcgtggcacaactgtacttcttccatttcctgggctctacacagtgcttcctgtacacactgatggcctacgacagatacctggccatttgtcagcctctgcgatatcctgtgctgatgaacggcagactgtgcaccatccttgtggctggagcctgggtggctggcagcattcacggcagcatccaggccaccctgacatttagactgccttactgcggccctaaccaggtggactactttatctgcgacatcccagctgtgctgagactggcctgcgccgacacaacagtgaacgagctggtgacattcgtggatatcggcgtggtcgccgctagctgctttatgctgatcctcctgagctacgccaacatcgtgcacgccatcctgaaaatcagaaccgccgatggccggcggagagccttcagcacctgtggcagccacctgaccgtggtgaccgtctactacgtgccctgtatcttcatctacctgcgggccggaagcaagagccccctggacggcgctgtggccgtgttctacaccgtggtgacccctctgctgaatcctctgatctacaccctgagaaaccaggaggtgaagtccgccctgaagcggatcacagccggcaggggcgccgcctctgaaaacaagtga

SEQ ID NO: 310 - DNA, 930 bp, Artificial Sequence
  OR10J1 consensus-c
atgaaacgggaaaaccacaccctggtcaccgagttcgtgtttcagggcttcagcagcttccacgagcaccagctcacattgtttgtggttttcctggccctgtacatcctgacactcgcaggcaacgtgatcattgtgaccatcatcagcatcgaccggcacctgcacacacctatgtacttcttcctgagcatgctgagcaccagcgagacagtgtataccctggtgatcctgccaagaatgctgtccagcctggttggcctgagccagcctatcagcctggccggatgtgctacacagatgttcttcttcatcaccctggccatcaacaactgcttcctgctgaccgccatgggctacgacagatacgtggctatctgcaatcccctgcggtacatggtgatcatgaacaagcgggtgtgcatccagctggtgtggggagcctgcagcatcggcctgatcgtggccatcactcaagtgtcctctgtgttcagactgcctttctgcgccagaaaggtggcccatttcttttgcgacattaggcccgtgatgaaactgtcttgtatcgataccaccgtgaacgagatcctgacacttatcatctccgtcctggtgatcgtggtccccatgggcctggtctttatcagctacatcctgatcatctctaccatcctgaagatcgcctccgccgagggcagaaagaaggccttcgccacatgcgccagccacctgacagtggtgatcgtgcactacggctgtgctagcatcgcttatctgaaacctaagtctgaaaataccagagatcaggaccagctgatcagcgtgacctacaccgtgatcacccctctgctgaaccctgtggtgtacaccctgagaaacaaggaagtgaaggacgccctgtgcagagccattggcggcaagttcagctga

SEQ ID NO: 311 - DNA, 942 bp, Artificial Sequence
  OR10J3 consensus-c
atgcctaagccaaactctacattcgtgacagagttcctgttcgagggcttcagctcttttggctggcagcacagactggtgttcttcgtggtgtttctgaccctttatctgctgacactgagcggaaatgtgatcatcgtgaccatcatccggctggacagacacctgcacacccctatgtacttcttcctgagcatgctgagcatctctgaaacctgctacaccgttgctatcatccccagaatgctgtccggcctgctcaacccacaccagcctatcgccacacagggctgtgccacccagctgttcttctacctgaccttcggcatcaacaactgcttcctgctgaccgccatgggatacgaccggtatgtggccatctgcaaccccctgcggtacagcgtgattatgggcaagcgcgcttgtgtgcagctggccagcggcagcctgggcatcggcctgggaatggccatcgttcaagtcaccagcgtgttcggcctccccttctgcgacgcctttgtgatcagccatttcttttgtgatgtgcggcctctgctgaagctggcctgcaccgacaccaccgtgaacgagatcatcaatttcgtggtctccgtgtgcgtgctggtcctgcctatgggcctggtgttcatctcctacgtgctgatcatttctaccatcctgaagatcgcctctgccgagggcagaaagaaggcctttgccacatgcgccagccacctgacagtggtgatcatccactacggctgcgctagcatcatctacctgaaacccaagtcccagagcagcctgggacaggatagactgatcagcgtgacctacaccgtgataacacctctgctgaaccctgtggtgtacagcctgagaaacaaagaggtgaaggacgccctggctagagccagaggcgccaagcctctgtctagctga

SEQ ID NO: 312 - DNA, 942 bp, Artificial Sequence
  OR10K1 consensus-c
atggaacaggtgaacgagacactggtgcgggagttcgtgttcctgggcttctcctccctggccggcctgcagcagctgctgtttgtggtgtttctgctgctatacctgttcaccctgggcaccaatgccattatcatcagcacaatcgtgcttgatagagccctgcacacccctatgtacttcttcctggccgtgctgagctgcagcgagacatgctacaccttcgtgatcgtgcccaagatgctggtcgacctgctggctcagaaaaagaccatctcttttttgggatgcgccatccagatgttcagctttctgttcctgggctgtagccactctttcctcctggccgctatgggatatgatagatacgtggccatctgcaaccccctgcggtacaccgtgctgatgggccacggcgtgtgcgtgggcctggtcgccgctgcttgtgcctgcggctttacagtgtccctggttacaaccagcctggttttccacctgcccttccactctagcaaccagctgcaccacttcttctgcgacatctctcctgtgctgaaactggccagccaccacagcagactgagccaactggtgatcttcatgctcggagtgttcgtgctggtgatcccactgctgctgatcctggtgtcctacatcagaatcatcagcgccatcctgaagatccctagcagcgtgggcagatacaaggccttcagcacctgtgccagccatctgatcgtcgtgacagtgcactacggctgcgccagtttcatctacctgaggcctaagagcaattactcctctagccaggacaccctgatttctgtgagctacacaatcctgacccctctctttaacccaatgatctacagcctgcggaacaaggagttcaagagcgccctgcgcagaaccatgggccagaccagctatcctctgaactga

SEQ ID NO: 313 - DNA, 945 bp, Artificial Sequence
  OR10K2 consensus-c
atggaaagagtgaacgagacactggtgcgggagttcgtgtttctgggatttagctctctggccggcctgcagcagctgctgtttgtggtgttcctgctgctgtacctgttcacactgggcaccaacgccattatcatctctactatcgtgcttgatagagccctgcacacccctatgtacttcttcctggccgtgctgagctgcagcgagacatgctacacattcgtgatcgtgccaaagatgctggtggacctgctggctcagaaaaagaccatctctttcctgggctgcgccatccagatgttcaccttcctgttcctgggctgtagccacagcttcctgctggccgctatgggctacgaccggtacgtggccatctgcaatccactgagatacaccgtgctgatgggccacggagtgtgcgtgggcctggttgctgccgcctgcgcttgtggcttcaccgtggcccagatcataacatctctggtctttcacctgcctttccacagcagcaaccagctgcaccactttttctgcgacatcagtcctgtgctgaaggtggccagccatcatacacacttctcccaaatcgtgatcttcatgctgtgtgccctggtgctggtgatccctctgcttctgatcctggtctcctatatccacatcatcagcgccattctgcaatttcctagcaccctgggcagatacaaggccttcagcacctgcgccagccacctgatcgttgtgaccgtgcactacggctgtgctagcttcatctatctgcgccccaagagcaattactctagcagccaggatgccctgatctctgtgtcctacaccatcctgacccctctgttcaaccccatgatctacagcctgcggaacaaagagttcaagtccgccctgtgcagagtggtcggaagaaccatcagcctcccccagcactga

SEQ ID NO: 314 - DNA, 945 bp, Artificial Sequence
  OR10T2 consensus-c
atgcggggcttcaacaccaccgtggtgacccagttcatcctcgtgggcttttctagcctgggagaactgcagctgctgctgttcgtgatcttcctgctgctgtatctgacaatcttggttgccaacgccaccatcatgaccgtgatcagactgtctagaaccctgcacaccccaatgtacggcttcctgttcatcctgagcttcagcgagacatgctacacactggtcatcatccctcagctgctggtgcacctgctgagcgatacaaagaccatctccttcatggcctgcgccacccaactgtttttcttcctgggctttgcctgtaccaactgcttcctgatcgccgtgatgggctacgacagatacgtggctatctgccaccctctcagatacaccctgatcatgaacaagcggctgggactgggcctggtgtccctgagcggcgccacaggcttcctgatcgccctggtggccacaaatctgatttgtgatatgcccttttgcggccctaacagagttaaccactacttctgcgacatggcccctgtgatcaagctggcctgcaccgacacccacgtgaaggagctggccctgttcagcctgagcatcctggtgatcatggtccccttcctgctgattctgatcagctacggcttcatcgtgaataccatccttaaaatccctagcgccgagggcaagagaaaggcctttgccacatgtgctagccacctgaccgtggtgttcgtgcattatggctgcgcttctatcatctacctgcgccccaagtctaagtccgccagcgacaaggaccagctggtggctgtgacctacacagtcgtgaccccactgctcaaccctctggtgtacagcctgcggaacaaggaagtgaaaaccgccctgaaaagagtgctgggaatgcctgtggctacaaagatgagctga

SEQ ID NO: 315 - DNA, 933 bp, Artificial Sequence
  OR10X1 consensus-c
atgaagatcaaccagaccatcctgaaagagttcatcctggtcggtttttctgtgtacccccacgtgcagacattcctgttcgtggtgttcttttgcctgtacctgctcaccctcgctggcaacctggccatcatgggcctgacctgggtggaccggagcctgcacacccctatgtacctgtttctgtctgctctgtcttttagcgagacctgttacaccctgacaattatccccaagatgctggaagatctgctggccaaggatagaagcatcagcgtgatcggctgtggactgcaaatgtgcttcttcctgggactgggcggcacaaattgcatcattctgaccctgatgggctacgacagattcctggctatctgtaatcctctgagataccctctgctgatgaccaacatcgtgtgcggccagctggtggccagcgcctgggccggcggattcttcatttctctgacagagacagccctgatcttcagaggcagcttctgcagacctaacctggtgaagcatttcttctgccacatgcgggccgtggtgcggctgagctgcatcgactccgatctgaccgagttcatcgtgaccctgatcagcgtctccggactgctgggcaccttcctgctgatcatcctgacctacgtgttcatcctctccaccgtgctgcgcatccctagcgccgaaggcaaacagaaggccttcagcacatgcgccagccacctgacagtggtgatcatccacttcggctttgcctctatcgtgtatctgaagcctgaggccagcggcggcgacgacaccctgatcgccgtgccctacacagttatcaccccattcctgagccctctgatcttcagcctgagaaacaaggacatgaaaaacgcttttagaaagatgctgggcaagaccgtggccctgaagaagtga

SEQ ID NO: 316 - DNA, 936 bp, Artificial Sequence
  OR11G2 consensus-c
atgaagatcagcaacacccccaacaacagcagcaccatcactggattcatcctgctgggcttcccttgcccaagagaaggccagatcctcctgtttgtgctgttctctgtggtgtacctgctgaccctgatgggcaacggcagcatcatctgcgccgtgcggtgggaccagcgcctgcacacccctatgtacatcctgctggctaatttctctttcctggaaatctggtacgtgacctccaccgtgcctaacatgttggcaaattttctgagcgataccaaggtgatctcctttagcggctgtttcctgcaattttatttcttcttcagcctgggctctaccgagtgcttcttcttagccgtgatggcctttgatagatacctggctatttgtagacctctgcactaccccacaattatgacaggccggctgtgcaccaacctggtggtcagctgctgggtgctgggcttcctgtggttcctgatccctatcatcatcatcagccagatgagcttctgcggcagtagaatcatcgaccacttcctgtgcgaccccggccctctgctggctctgacatgcaagaaagcccctgtgatcgagctggttttctctacactgtctccactgcctctgttcatccccttcctgttcatcatgggatcctacgccctggtcctgcgggccgttcttaaagtgcccagcgccgccggaagaagaaaggccttcagcacctgtggctcccatctggccgtggtgagcctgttctacggctctgtgctggtgatgtacggcagcccaacaagcgagcacgaggccggcatgcagaagatcgtgacactgttttacagcgtggtgacccctctgctgaaccctgtgatctacagcctgagaaacaaggacatgaagaaggccctgaagaaattcctcgggacctga

SEQ ID NO: 317 - DNA, 990 bp, Artificial Sequence
  OR11H6 consensus-c
atgttcttcatcatccacagcctggtgtccgtgttcctgaccgccctgggacctcagaatagaaccatgcacttcgtgaccgagttcgtgctgctcggatttcacggccagagagagatgcagagcttctttttcagcctgatcctggttctgtacctgctgaccctgctgggcaacggcgccatcgtgtgcgccgtgaagtgggaccgccggctgcatacccctatgtacatcctgctgggcaacttcgcttttctggaaatctggtacgtgtccagcaccgtgccaaacatgctggtgaacatcctgagcgagacaaagaccatcagcttttctggctgtttcctgcagttctacttcttcttcagcctgggcacaacagaatgcttttttctgagcgtgatggcctatgacagatacctggccatctgcagacctctgcactaccctagcatcatgaccggcaagttctgcgtgatcctggtgtgtgtgtgctgggtgtccggcttcctgtgctaccccgtgcctatcgtgctgatttctcagctccctttctgcggccctaacatcatcgaccactttgtatgcgaccccggcccactgttcgccctggcttgtatccccgccccttctaccgagctgatttgttacaccttcaacagcatgatcatcttcggccccttcttgtctatcctgggatcatatacactggtgctgagagccgtgctgcgggtgcccagcggagccggaagaacaaaggccttcagcacctgcggcagccacctgatggtcgtgtctctgttctacggcaccctgatggtgatgtacgtcagccctaccagcggcaatcctgctggcatgcaaaagatcatcaccctggtctacagcgccgtgacacctctgctgaaccccctgatctacagcctccggaacaaggatatgaaagatgccctgaaaaaggtgctgggcctgacagtgtcccagaactga

SEQ ID NO: 318 - DNA, 945 bp, Artificial Sequence
  OR11H7 consensus-c
atgaacaagtcccaaatctctaccgtgacacagttcgtgctgctgggcttccccggcccttggaagattcagatcatcctgtttagcatgatcctcctggtctacatccttacactgaccggcaatatggctatcatctgcgccgtgcggtgggaccaccggctgcatacccctatgtacatgctgctggccaacttcagctttctggaaatctggtacgtgacctgcaccgtgcctaatatgctggtgaacttcctcagcaagaccaagaccatcagcttcagcggctgtttcacccagttttacttcttcttcagcctgggaactacagagtgcttcttcctgtgtgtgatggcttatgatagatacctggccatttgtcaccccctgcactaccccagcatcatgaccggccagctgtgcggcatcctggtttctctgtgttggctgatcggatttctgggacacagcatccctatcttcttcatcagccagctgcctttctgcggccccaacatcatcgaccacttcctgtgcgacgtggaccctctgatggctctgagctgcgcccctacaccaatcatcggccacgtgttccactctgtgtcttctctgatcatcatcctgacaatcctgtacatcctgggctcctacaccctggtcctgcgggccgtgctgcaggtgccatctagcgccggcagacagaaagccttctctacatgcggcagccatctggtggtcgtgagccttttctacggcaccatcatggtgatgtatgtgagccctaccagcggcaacagcgtggccatgcacaagatcataacactgatctactccgtggtgacccctgtgctgaaccccctgatctacagcctgagaaacaaggatatgaaatacgccctgcaccacgtgttttgcggaatgagaatcattcagagaagctga

SEQ ID NO: 319 - DNA, 945 bp, Artificial Sequence
  OR11L1 consensus-c
atggaacctcagaacaccagcacagtcactgagttccagctcctgggcttccagaatctgctggagtggcaggccttgctgttcgtgatcttcctgctgatctactgcctgaccatcaccggcaacgtggtgatcatcaccgtggtgagccaggacctgcggctgcacagccccatgtacatgttcctgaagcacctgagcttccttgagatctggtacaccagcacaattgtgcccctgctgctggccaatctgctgagctggggccaggctatctctttctccgcatgcatggcccagctgtacttcttcgtgttcttcggcgccacagagtgcttcctgctggcctttatggcctacgatagatacctggctatctgttctccactgcattactcctttctgatgagcccagagaactgcaccgccctggtggccgtgagctgggtcacaggcgtgggcaccggctttctgcctagcctgatgatctcaaagctggacttctgcggacctaaccagatcaaccacttcttttgtgatctgccccccctgatgcagctgtcctgctctagcgtgtacgttacagagatggccatcttcatcctgtctatcgccgtgctgtgcatctgttttcttctgaccctcgtgagctacgtgttcatcgtgagctctatcctgagaatccctagcgccagcggacggctgaaaacctttagcacctgcggcagccacctggctgtggtgacaatctactacggcaccatgatcagcatgtacgtgcggcctaacgcccacctgagccctgagacaaacaagatcatctccgtgttctacaccgtggtgacccctctgctgaaccctgtgatctattctctgcgcaacaaggacttcaaggaagccgtgagaaagatcatgagaagaaaatgtggcgtctatagagcttga

SEQ ID NO: 320 - DNA, 945 bp, Artificial Sequence
  OR14A2 consensus-c
atggctaatgtgaccctggtcaccggcttcctgctgatgggattcagcgacatccaggaactgcagacactgtgtggcgtgcttttcctggtcatctacctggccgccctgatgagcaacctgctgatcatcacactgatcaccttagatctgaagctgcagacccctatgtacttcttcctgaagaacctgtctctgctggacgtgttccttgtgtccgtgcccatccccaagttcatcgtgaacagcctgacacacaacaattccatctcaatcctgggatgtgcttttcagctgctgctgatgaccagcttcagcgccggcgaaatctttgtgctgaccgcaatgagctacgacagatacgtggccatctgctgccctctccactacgaggtgatcatgaacaccggcgtgtgcgtgctgatggctggagttagctgggccgtgggcggcctgttcggcgccgcttatacagccggcaccttctccatgcctttctgcggcagcaacgtgatcccacagtttttctgcgatgtgcctagcctgctgagaatcagctgcagcgagacactgatggtgatctacgcctctatcggcatcggcgcctgtctgggaatctcctgctttatttgcatcgtgatcagctatatctacatcttctctacagtgctgaaaatccctaccaccaagggccagagcaaggccttcagcacctgtttccctcacctgactgtgttcaccgtgtttatcatcacagcctgcttcgtgtacctgaagccccctagcaactctcctagcgtgattgaccggctgctgtctgttatttacaccgtcctgcctccagtgttgaaccccgtgatctacagcctgcggaacaatgacatgaaatgcgccctgatcagactgctccaaaagacctacggccaggaggcctacttcatctga

SEQ ID NO: 321 - DNA, 927 bp, Artificial Sequence
  OR14A16 consensus-c
atgaacaacctgaccgtgacagagttcatcctgatgggatttagcacaaacaagaacatgcagatccttcattctgtgctcttcctgctgatctacctgtgcgccctgatgggcaacgtgctgatcatcatgatcaccaccctggaccaccacctgcacacccctatgtacttcttcctcaaaaacctgtctttcctggatctgtgtctgatctccgtgaccgtgccaaagtccatcgctaatagcctgatccacaacaatagcatcagcttcctgggctgcgtgtcccaggtgttcctgctgctgtccagcgcctctacagaactgctgctgctgaccgtgatgagcttcgaccggtacgccgctatctgccaccctctgcactacgaggtgatcatggacagaagcacctgtgtgcagatggccgccgtgagctggctgagcggcggcctgatcgccgtgatgcacaccgccggcaccttttctctgagctactgcggctctaatatggtgcaccagttcttctgtgatatccctcaactgctggccatcagctgcagcgagaacctgatcagagagatcgtgctgatcctgatcagcgttgtgctggacttctgctgcttcgtgatcatcatcagctacgtgcacatcttcagcacagttaagaagatcccctccacagaaggccagagcaaggcttatagcacctgcctgcctcacctgctggtggtcgtcctgtttctgtctaccggctttttcgcctacctgaagcccgccagcgaaagccctagcatcctggacctgctcattagcgtgttctacaccgtggtgcctccaacattcaaccccattatctacagcctgagaaacaaagccatgaaggtggccctgggaatgctgattaagggcaagctgacaaagaaatga

SEQ ID NO: 322 - DNA, 939 bp, Artificial Sequence
  OR14C36 consensus-c
atgcctaacagcaccaccgtcacggagttcctgctgatgagattctccgatgtgtgggagctgagaatcctgcacgccgccctgttcctgctgatgtacctggcaaccctgatgggcaatctgctgatcgtgaccgtgacaacatgtgacagcagcctgcatacccctatgtacttcttcctgaggaacctgtctatcctggacgcctgctacatcagcgtgaccgtgcctacagcctgtgtgaacagcctgctggatagcacaaccattagcaaggccggctgcgccgctcaggttttcctggtcgtgttctttgcctacgtggaactgctcttcctgaccatcatggcccacgatagatacgtggccatctgccaacctctgcactaccccgtgatcatgaacagtagaatctgcgtgcagatgacactggcttctctgctgagcggcctggtgtacgctggcatgcacaccggcaacaccttcagactgcctttttgccagagcaatgtcgtgcaccagttcttctgcgacatccccagcctgctgaagctgtcctgtagcgacacctttagcaacgaggtgatgatcgtggtgtctgctctcggagtgggcggcggatgttttatcttcatcatccggagctacatccacatcttcagcaccgtgctgaaattccccagaggcgccgagcggaccaaggccttctctacatgcgtccctcacatccttgtggtgtccgtgttcctgtctagctgcagcagcgtgtacctgcggcctcctgccatttctgccacaatccaggacatgatcctgagcgtgttttatagcatcgtgccaccattcctgaaccccatcatctatagcctgagaaacaagcagatcaaggaagccatcaaaaagatcatgaagcggattttctactccgagaacgtgtga

SEQ ID NO: 323 - DNA, 942 bp, Artificial Sequence
  OR14K1 consensus-c
atgaaccagacccagatgatggagttcctgctggtcagattcaccgagaactgggtgctgctgagactgcatgccctgctgttctccctgatctatctggtcgctgtgctggaaaacctggttatcatcctgctgaccatcctggaccacagactgcacacacctatgtacttcttcctgagacacctgtccttcctcgatctgtgcctgatctctgcaaccgtgcctaagagcatccttaatagcgtgacaagcaccgacagcatctccttcctgggctgtgtgttgcagctgtttctggtggtgctgctggccggatccgagatcggcatcctgacagccatgagctacgacagatacgtggccatctgctgtcctctgcactacgaggccgtgatgagtagaggcctgtgcgtgcagctgatggccctgagctggctgaatggcggagctctgggcctgctgtactctgctggcaccttttctctgaacttctgcggcagcgatgagatccaccagttcttctgcgacgtgccagccctgctgaagctgacctgcagcaaggaacacgccacaattagcgtgagcgtggccatcggcgtgtgctacgccttcagctgcctggtgtgtatcgtggtctcttacgtgtacatcttcagcacagtgctgcggatccccagccggcagagacaaagcaaggcctttagcacctgtgtgccccacctgatcgtggtgaccaccttcctggttacaggcgccgtggcctatctgaaacccggctctgatgcccctagccttctggacctgctggtgagcgtcttttacagcgtggctccacctaccctgaaccctgtgatctactgcctgaggaacaaggacatcaagtccgccttgagcaaagtgctgtggaacgtgcggagctctggcgtgatgaagcggtga

SEQ ID NO: 324 - DNA, 930 bp, Artificial Sequence
  OR7E24 consensus-c
atggaaccccagaacctgacaggagtgagcgagttcctgctgctcggcctgagcgaggatcctgagctgcaacctgtgctggccggcctgtttctgagcatgtacctggtgaccgtgctgggcaacctgcttattatcctggctgtgagctctgatagccacctgcacacccctatgtatttcttcctgagcaatctgagcctggctgatatcggcttcaccagcacaaccgtgcccaagatgatcgtcgacattcagacacacagccgggtgatcagctacgagggctgtctgacccagatgtcttttttcgtgctgttcgcctgcatggacgatatgctgctcagcgtgatggcctacgacagattcgtggccatctgccaccctctgcactacagggtgatcatgaaccctagactgtgcggctttctggtgctggtcagcttcttcatcagcctgctggacagccagctgcacaacctgatcgtgctgcagctgacctgcttcaaggacgtggaaatctctaatttcttctgcgacccctctcagctgctgcacctggcttgtagcgacaccttcatcaacaacatcgtgatctactttatgggcgccatcttcggcttcctgcctatcagcggcatcctgtttagctactacaaaatcgtttcctcaatcctgagagtgccttccagcggcggcaaatacaaggccttctctacatgcggcagccacctcgccgtggtgtgcctgttctacggcaccggactgggaggttatctgagcagcgccgtgtccccttctccaagaaagtccatggtggcctctgtgatgtacaccgttgtgacaccaatgctgaaccccttcatctacagcctgcggaaccgggacatcaagagcgccctgtgtagactgcattctagaatcatctga

SEQ ID NO: 325 - DNA, 684 bp, Homo sapiens
atgtgtaaaagcgtgaccacagatgagtggaagaaagtcttctatgagaagatggaggaggcaaagccggctgacagctgggacctcatcatagaccccaacctcaagcacaatgtgctgagccctggttggaagcagtacctggaattgcatgcttcaggcaggttccactgctcctggtgctggcacacctggcagtcgccctacgtggtcatcctcttccacatgttcctggaccgcgcccagcgggcgggctcggtgcgcatgcgcgtcttcaagcagctgtgctatgagtgcggcacggcgcggctggacgagtccagcatgctggaggagaacatcgagggcctggtggacaacctcatcaccagcctgcgcgagcagtgctacggcgagcgtggcggccagtaccgcatccacgtggccagccgccaggacaaccggcggcaccgcggagagttctgcgaggcctgccaggagggcatcgtgcactggaagcccagcgagaagctgctggaggaggaggcgaccacctacaccttctcccgggcgcccagccccaccaagtcgcaggaccagacgggctcaggctggaacttctgctctatcccctggtgcttgttttgggccacggtcctgctgctgatcatctacctgcagttctctttccgtagctccgtataa

SEQ ID NO: 326 - protein, 227 aa, Homo sapiens
MCKSVTTDEWKKVFYEKMEEAKPADSWDLIIDPNLKHNVLSPGWKQYLELHASGRFHCSWCWHTWQSPYVVILFHMFLDRAQRAGSVRMRVFKQLCYECGTARLDESSMLEENIEGLVDNLITSLREQCYGERGGQYRIHVASRQDNRRHRGEFCEACQEGIVHWKPSEKLLEEEATTYTFSRAPSPTKSQDQTGSGWNFCSIPWCLFWATVLLLIIYLQFSFRSSV

SEQ ID NO: 327 - protein, 317 aa, Homo sapiens
MSFAPNASHSPVFLLLGFSRANISYTLLFFLFLAIYLTTILGNVTLVLLISWDSRLHSPMYYLLRGLSVIDMGLSTVTLPQLLAHLVSHYPTIPAARCLAQFFFFYAFGVTDTLVIAVMALDRYVAICDPLHYALVMNHQRCACLLALSWVVSILHTMLRVGLVLPLCWTGDAGGNVNLPHFFCDHRPLLRASCSDIHSNELAIFFEGGFLMLGPCALIVLSYVRIGAAILRLPSAAGRRRAVSTCGSHLTMVGFLYGTIICVYFQPPFQNSQYQDMVASVMYTAITPLANPFVYSLHNKDVKGALCRLLEWVKVDP

SEQ ID NO: 328 - protein, 312 aa, Homo sapiens
MDGGNQSEGSEFLLLGMSESPEQQRILFWMFLSMYLVTVVGNVLIILAISSDSRLHTPVYFFLANLSFTDLFFVTNTIPKMLVNLQSHNKAISYAGCLTQLYFLVSLVALDNLILAVMAYDRYVAICCPLHYTTAMSPKLCILLLSLCWVLSVLYGLIHTLLMTRVTFCGSRKIHYIFCEMYVLLRMACSNIQINHTVLIATGCFIFLIPFGFVIISYVLIIRAILRIPSVSKKYKAFSTCASHLGAVSLFYGTLCMVYLKPLHTYSVKDSVATVMYAVVTPMMNPFIYSLRNKDMHGALGRLLDKHFKRLT

SEQ ID NO: 329 - protein, 312 aa, Homo sapiens
MDGDNQSENSQFLLLGISESPEQQQILFWMFLSMYLVTVLGNVLIILAISSDSHLHTPMYFFLANLSFTDLFFVTNTIPKMLVNFQSQNKAISYAGCLTQLYFLVSLVTLDNLILAVMAYDRYVAICCPLHYVTAMSPGLCVLLLSLCWGLSVLYGLLLTFLLTRVTFCGPREIHYLFCDMYILLWLACSNTHIIHTVLIATGCFIFLTPLGFMTTSYVRIVRTILQMPSASKKYKTFSTCASHLGVVSLFYGMLAMVYLQPLHTYSMKDSVATVMYAVLTPMMNPFIYRLRNKDMHGAPGRVLWRPFQRPK

SEQ ID NO: 330 - protein, 323 aa, Homo sapiens
MMGQNQTSISDFLLLGLPIQPEQQNLCYALFLAMYLTTLLGNLLIIVLIRLDSHLHTPVYLFLSNLSFSDLCFSSVTMPKLLQNMQNQDPSIPYADCLTQMYFFLYFSDLESFLLVAMAYDRYVAICFPMHYTAICFLLHYTAIMSPMLCLSVVALSWVLTTFHAMLHTLLMARLCFCADNVIPHFFCDMSALLKLACSDTRVNEWVIFIMGGLILVIPFLLILGSYARIVSSILKVPSSKGICKAFSTCGSHLSVVSLFYGTVIGLYLCPSANSSTLKDTVMAMMYTVVTPMLTPFIYSLRNRDMKGALERVICKRKNPFLL

SEQ ID NO: 331 - protein, 312 aa, Homo sapiens
MSGTNQSSVSEFLLLGLSRQPQQQHLLFVFFLSMYLATVLGNLLIILSVSIDSCLHTPMYFFLSNLSFVDICFSFTTVPKMLANHILETQTISFCGCLTQMYFVFMFVDMDNFLLAVMAYDHFVAVCHPLHYTAKMTHQLCALLVAGLWVVANLNVLLHTLLMAPLSFCADNAITHFFCDVTPLLKLSCSDTHLNEVIILSEGALVMITPFLCILASYMHITCTVLKVPSTKGRWKAFSTCGSHLAVVLLFYSTIIAVYFNPLSSHSAEKDTMATVLYTVVTPMLNPFIYSLRNRYLKGALKKVVGRVVFSV

SEQ ID NO: 332 - protein, 313 aa, Homo sapiens
MEGKNLTSISECFLLGFSEQLEEQKPLFGSFLFMYLVTVAGNLLIILVIITDTQLHTPMYFFLANLSLADACFVSTTVPKMLANIQIQSQAISYSGCLLQLYFFMLFVMLEAFLLAVMAYDCYVAICHPLHYILIMSPGLCIFLVSASWIMNALHSLLHTLLMNSLSFCANHEIPHFFCDINPLLSLSCTDPFTNELVIFITGGLTGLICVLCLIISYTNVFSTILKIPSAQGKRKAFSTCSSHLSVVSLFFGTSFCVDFSSPSTHSAQKDTVASVMYTVVTPMLNPFIYSLRNQEIKSSLRKLIWVRKIHSP

SEQ ID NO: 333 - protein, 355 aa, Homo sapiens
MEPEKQTEISEFFLQGLSEKPEHQTLLFTMFLSTYLVTIIGNALIILAIITDSHLHTPMYFFLFNLSLVDTLLSSTTVPKMLANIQAQSRAIPFVGCLTQMYAFHLFGTMDSFLLAVMAIDRFVAIVHPQRYLVLMCSPVCGLLLGASWMITNLQSLIHTCLMAQLTFCAGSEISHFFCDLMPLLKLSGSDTHTNELVIFAFGIVVGTSPFSCILLSYIRIFWTVFKIPSTRGKWKAFSTCGLHLTVVSLSYGTIFAVYLQPTSPSSSQKDKAAALMCGVFIPMLNPFIYSIRNKDMKAALGKLIGKVAVPCPRPEQLLDVYHVPGSLLAARDTEMHPIPYPGGVQSLAGNRDME

SEQ ID NO: 334 - protein, 322 aa, Homo sapiens
MSPENQSSVSEFLLLGLPIRPEQQAVFFALFLGMYLTTVLGNLLIMLLIQLDSHLHTPMYFFLSHLALTDISFSSVTVPKMLMNMQTQHLAVFYKGCISQTYFFIFFADLDSFLITSMAYDRYVAICHPLHYATIMTQSQCVMLVAGSWVIACACALLHTLLLAQLSFCADHIIPHYFCDLGALLKLSCSDTSLNQLAIFTAALTAIMLPFLCILVSYGHIGVTILQIPSTKGICKALSTCGSHLSVVTIYYRTIIGLYFLPPSSNTNDKNIIASVIYTAVTPMLNPFIYSLRNKDIKGALRKLLSRSGAVAHACNLNTLGG

SEQ ID NO: 335 - protein, 313 aa, Homo sapiens
MKRENQSSVSEFLLLDLPIWPEQQAVFFTLFLGMYLITVLGNLLIILLIRLDSHLHTPMFFFLSHLALTDISLSSVTVPKMLLSMQTQDQSILYAGCVTQMYFFIFFTDLDNFLLTSMAYDRYVAICHPLRYTTIMKEGLCNLLVTVSWILSCTNALSHTLLLAQLSFCADNTIPHFFCDLVALLKLSCSDISLNELVIFTVGQAVITLPLICILISYGHIGVTILKAPSTKGIFKALSTCGSHLSVVSLYYGTIIGLYFLPSSSASSDKDVIASVMYTVITPLLNPFIYSLRNRDIKGALERLFNRATVLSQ

SEQ ID NO: 336 - protein, 316 aa, Homo sapiens
MEAANESSEGISFVLLGLTTSPGQQRPLFVLFLLLYVASLLGNGLIVAAIQASPALHAPMYFLLAHLSFADLCFASVTVPKMLANLLAHDHSISLAGCLTQMYFFFALGVTDSCLLAAMAYDCYVAIRHPLPYATRMSRAMCAALVGMAWLVSHVHSLLYILLMARLSFCASHQVPHFFCDHQPLLRLSCSDTHHIQLLIFTEGAAVVVTPFLLILASYGAIAAAVLQLPSASGRLRAVSTCGSHLAVVSLFYGTVIAVYFQATSRREAEWGRVATVMYTVVTPMLNPIIYSLWNRDVQGALRALLIGRRISASDS

SEQ ID NO: 337 - protein, 310 aa, Homo sapiens
MGRNNLTRPSEFILLGLSSRPEDQKPLFAVFLPIYLITVIGNLLIILAIRSDTRLQTPMYFFLSILSFVDICYVTVIIPKMLVNFLSETKTISYSECLTQMYFFLAFGNTDSYLLAAMAIDRYVAICNPFHYITIMSHRCCVLLLVLSFCIPHFHSLLHILLTNQLIFCASNVIHHFFCDDQPVLKLSCSSHFVKEITVMTEGLAVIMTPFSCIIISYLRILITVLKIPSAAGKRKAFSTCGSHLTVVTLFYGSISYLYFQPLSNYTVKDQIATIIYTVLTPMLNPFIYSLRNKDMKQGLAKLMHRMKCQ

SEQ ID NO: 338 - protein, 324 aa, Homo sapiens
MGMSNLTRLSEFILLGLSSRSEDQRPLFALFLIIYLVTLMGNLLIILAIHSDPRLQNPMYFFLSILSFADICYTTVIVPKMLVNFLSEKKTISYAECLAQMYFFLVFGNIDSYLLAAMAINRCVAICNPFHYVTVMNRRCCVLLLAFPITFSYFHSLLHVLLVNRLTFCTSNVIHHFFCDVNPVLKLSCSSTFVNEIVAMTEGLASVMAPFVCIIISYLRILIAVLKIPSAAGKHKAFSTCSSHLTVVILFYGSISYVYLQPLSSYTVKDRIATINYTVLTSVLNPFIYSLRNKDMKRGLQKLINKIKSQMSRFSTKTNKICGP

SEQ ID NO: 339 - protein, 311 aa, Homo sapiens
METKNYSSSTSGFILLGLSSNPKLQKPLFAIFLIMYLLTAVGNVLIILAIYSDPRLHTPMYFFLSNLSFMDICFTTVIVPKMLVNFLSETKIISYVGCLIQMYFFMAFGNTDSYLLASMAIDRLVAICNPLHYDVVMKPWHCLLMLLGSCSISHLHSLFRVLLMSRLSFCASHIIKHFFCDTQPVLKLSCSDTSSSQMVVMTETLAVIVTPFLCTIFSYLQIIVTVLRIPSAAGKWKAFSTCGSHLTVVVLFYGSVIYVYFRPLSMYSVMKGRVATVMYTVVTPMLNPFIYSLRNKDMKRGLKKLRHRIYS

SEQ ID NO: 340 - protein, 311 aa, Homo sapiens
MEIKNYSSSTSGFILLGLSSNPQLQKPLFAIFLIMYLLAAVGNVLIIPAIYSDPRLHTPMYFFLSNLSFMDICFTTVIVPKMLVNFLSETKVISYVGCLAQMYFFMAFGNTDSYLLASMAIDRLVAICNPLHYDVVMKPRHCLLMLLGSCSISHLHSLFRVLLMSRLSFCASHIIKHFFCDTQPVLKLSCSDTSSSQMVVMTETLAVIVTPFLCIIFSYLRIMVTVLRIPSAAGKWKAFSTCGSHLTAVALFYGSIIYVYFRPLSMYSVVRDRVATVMYTVVTPMLNPFIYSLRNKDMKRGLKKLQDRIYR

SEQ ID NO: 341 - protein, 309 aa, Homo sapiens
MERINHTSSVSEFILLGLSSRPEDQKTLFVLFLIVYLVTITGNLLIILAIRFNPHLQTPMYFFLSFLSLTDICFTTSVVPKMLMNFLSEKKTISYAGCLTQMYFLYALGNSDSCLLAVMAFDRYVAVCDPFHYVTTMSHHHCVLLVAFSCSFPHLHSLLHTLLLNRLTFCDSNVIHHFLCDLSPVLKLSCSSIFVNEIVQMTEAPIVLVTRFLCIAFSYIRILTTVLKIPSTSGKRKAFSTCGFYLTVVTLFYGSIFCVYLQPPSTYAVKDHVATIVYTVLSSMLNPFIYSLRNKDLKQGLRKLMSKRS

SEQ ID NO: 342 - protein, 313 aa, Homo sapiens
MEPRNQTSASQFILLGLSEKPEQETLLFSLFFCMYLVMVVGNLLIILAISIDSHLHTPMYFFLANLSLVDFCLATNTIPKMLVSLQTGSKAISYPCCLIQMYFFHFFGIVDSVIIAMMAYDRFVAICHPLHYAKIMSLRLCRLLVGALWAFSCFISLTHILLMARLVFCGSHEVPHYFCDLTPILRLSCTDTSVNRIFILIVAGMVIATPFVCILASYARILVAIMKVPSAGGRKKAFSTCSSHLSVVALFYGTTIGVYLCPSSVLTTVKEKASAVMYTAVTPMLNPFIYSLRNRDLKGALRKLVNRKITSSS

SEQ ID NO: 343 - protein, 314 aa, Homo sapiens
MDNSNWTSVSHFVLLGISTHPEEQIPLFLVFSLMYAINISGNLAIITLILSAPRLHIPMYIFLSNLALTDICFTSTTVPKMLQIIFSPTKVISYTGCLAQTYFFICFAVMENFILAVMAYDRYIAICHPFHYTMILTRMLCVKMVVMCHALSHLHAMLHTFLIGQLIFCADNRIPHFFCDLYALMKISCTSTYLNTLMIHTEGAVVISGALAFITASYACIILVVLRIPSAKGRWKTFSTCGSHLTVVAIFYGTLSWVYFRPLSSYSVTKGRIITVVYTVVTPMLNPFIYSLRNGDVKGGFMKWMSRMQTFFFR

SEQ ID NO: 344 - protein, 325 aa, Homo sapiens
MKTFSSFLQIGRNMHQGNQTTITEFILLGFFKQDEHQNLLFVLFLGMYLVTVIGNGLIIVAISLDTYLHTPMYLFLANLSFADISSISNSVPKMLVNIQTKSQSISYESCITQMYFSIVFVVIDNLLLGTMAYDHFVAICHPLNYTILMRPRFGILLTVISWFLSNIIALTHTLLLIQLLFCNHNTLPHFFCDLAPLLKLSCSDTLINELVLFIVGLSVIIFPFTLSFFSYVCIIRAVLRVSSTQGKWKAFSTCGSHLTVVLLFYGTIVGVYFFPSSTHPEDTDKIGAVLFTVVTPMINPFIYSLRNKDMKGALRKLINRKISSL

SEQ ID NO: 345 - protein, 325 aa, Homo sapiens
MKTLCSFLQISRNMHQENQTTITEFILLGLSNQAEHQNLLFVLFLSMYVVTVVGNGLIIVAISLDIYLHTPMYLFLAYLSFADISSISNSVPKMLVNIQTNSQSISYESCITQMYFSIVFVVTDNLLLGTMAFDHFVAICHPLNYTTFMRARFGTLLTVISWFLSNIIALTHTLLLIQLLFCDHNTLPHFFCDLAPLLKLSCSDTMINELVLFIVGLSVIIFPFVLIFFSYVCIIRAVLGVSSTQGKWKAFSTCGSHLTIALLFYGTTVGVYFFPSSTHPEDTDKIGAVLFTVVTPMMNPFIYSLRNKDMKGALRKLINRKISSL

SEQ ID NO: 346 - protein, 310 aa, Homo sapiens
MGENQTMVTEFLLLGFLLGPRIQMLLFGLFSLFYIFTLLGNGAILGLISLDSRLHTPMYFFLSHLAVVDIAYTRNTVPQMLANLLHPAKPISFAGCMTQTFLCLSFGHSECLLLVLMSYDRYVAICHPLRYSVIMTWRVCITLAVTSWTCGSLLALAHVVLILRLPFSGPHEINHFFCEILSVLRLACADTWLNQVVIFAACVFFLVGPPSLVLVSYSHILAAILRIQSGEGRRKAFSTCSSHLCVVGLFFGSAIIMYMAPKSRHPEEQQKVFFLFYSFFNPTLNPLIYSLRNGEVKGALRRALGKESHS

SEQ ID NO: 347 - protein, 311 aa, Homo sapiens
MTKNQTWVTEFILLGFPLSLRIQMLLSGLFSLLYVFTLLGNGAILGLIWLDSRLHTPMYFFLSHLAIIDISYASNNVPKMLTNLGLNKRKTISFVPCTMQTFLYMAFAHTECLILVMMSYDRYMAICHPLQYSVIMRWGVCTVLAVTSWACGSLLALVHVVLILRLPFCGPHEINHFFCEILSVLKLACADTWLNQVVIFAASVFILVGPLCLVLVSYSRILAAILRIQSGEGRRKAFSTCSSHLCMVGLFFGSAIVMYMAPKSRHPEEQQKVLSLFYSLFNPMLNPLIYSLRNAEVKGALKRVLWKQRSK

SEQ ID NO: 348 - protein, 310 aa, Homo sapiens
MGDNITSITEFLLLGFPVGPRIQMLLFGLFSLFYVFTLLGNGTILGLISLDSRLHAPMYFFLSHLAVVDIAYACNTVPRMLVNLLHPAKPISFAGRMMQTFLFSTFAVTECLLLVVMSYDLYVAICHPLRYLAIMTWRVCITLAVTSWTTGVLLSLIHLVLLLPLPFCRPQKIYHFFCEILAVLKLACADTHINENMVLAGAISGLVGPLSTIVVSYMCILCAILQIQSREVQRKAFCTCFSHLCVIGLFYGTAIIMYVGPRYGNPKEQKKYLLLFHSLFNPMLNPLICSLRNSEVKNTLKRVLGVERAL

SEQ ID NO: 349 - protein, 310 aa, Homo sapiens
MEGNKTWITDITLPRFQVGPALEILLCGLFSAFYTLTLLGNGVIFGIICLDCKLHTPMYFFLSHLAIVDISYASNYVPKMLTNLMNQESTISFFPCIMQTFLYLAFAHVECLILVVMSYDRYADICHPLRYNSLMSWRVCTVLAVASWVFSFLLALVPLVLILSLPFCGPHEINHFFCEILSVLKLACADTWLNQVVIFAACVFILVGPLCLVLVSYLRILAAILRIQSGEGRRKAFSTCSSHLCVVGLFFGSAIVTYMAPKSRHPEEQQKVLSLFYSLFNPMLNPLIYSLRNAEVKGALRRALRKERLT

SEQ ID NO: 350 - protein, 357 aa, Homo sapiens
MNWVNKSVPQEFILLVFSDQPWLEIPPFVMFLFSYILTIFGNLTIILVSHVDFKLHTPMYFFLSNLSLLDLCYTTSTVPQMLVNICNTRKVISYGGCVAQLFIFLALGSTECLLLAVMCFDRFVAICRPLHYSIIMHQRLCFQLAAASWISGFSNSVLQSTWTLKMPLCGHKEVDHFFCEVPALLKLSCVDTTANEAELFFISVLFLLIPVTLILISYAFIVQAVLRIQSAEGQRKAFGTCGSHLIVVSLFYGTAISMYLQPPSPSSKDRGKMVSLFCGIIAPMLNPLIYTLRNKEVKEAFKRLVAKSLLNQEIRNMQMISFAKDTVLTYLTNFSASCPIFVITIENYCNLPQRKFP

SEQ ID NO: 351 - protein, 313 aa, Homo sapiens
MNWENESSPKEFILLGFSDRAWLQMPLFVVLLISYTITIFGNVSIMMVCILDPKLHTPMYFFLTNLSILDLCYTTTTVPHMLVNIGCNKKTISYAGCVAHLIIFLALGATECLLLAVMSFDRYVAVCRPLHYVVIMNYWFCLRMAAFSWLIGFGNSVLQSSLTLNMPRCGHQEVDHFFCEVPALLKLSCADTKPIEAELFFFSVLILLIPVTLILISYGFIAQAVLKIRSAEGRQKAFGTCGSHMIVVSLFYGTAIYMYLQPPSSTSKDWGKMVSLFYGIITSMLNSLIYSLRNKDMKEAFKRLMPRIFFCKK

SEQ ID NO: 352 - protein, 313 aa, Homo sapiens
MNWVNDSIIQEFILLGFSDRPWLEFPLLVVFLISYTVTIFGNLTIILVSRLDTKLHTPMYFFLTNLSLLDLCYTTCTVPQMLVNLCSIRKVISYRGCVAQLFIFLALGATEYLLLAVMSFDRFVAICRPLHYSVIMHQRLCLQLAAASWVTGFSNSVWLSTLTLQLPLCDPYVIDHFLCEVPALLKLSCVETTANEAELFLVSELFHLIPLTLILISYAFIVRAVLRIQSAEGRQKAFGTCGSHLIVVSLFYSTAVSVYLQPPSPSSKDQGKMVSLFYGIIAPMLNPLIYTLRNKEVKEGFKRLVARVFLIKK

SEQ ID NO: 353 - protein, 312 aa, Homo sapiens
MDGVNDSSLQGFVLMGISDHPQLEMIFFIAILFSYLLTLLGNSTIILLSRLEARLHTPMYFFLSNLSSLDLAFATSSVPQMLINLWGPGKTISYGGCITQLYVFLWLGATECILLVVMAFDRYVAVCRPLRYTAIMNPQLCWLLAVIACLGGLGNSVIQSTFTLQLPLCGHRRVEGFLCEVPAMIKLACGDTSLNQAVLNGVCTFFTAVPLSIIVISYCLIAQAVLKIRSAEGRRKAFNTCLSHLLVVFLFYGSASYGYLLPAKNSKQDQGKFISLFYSLVTPMVNPLIYTLRNMEVKGALRRLLGKGREVG

SEQ ID NO: 354 - protein, 317 aa, Homo sapiens
MGTDNQTWVSEFILLGLSSDWDTRVSLFVLFLVMYVVTVLGNCLIVLLIRLDSRLHTPMYFFLTNLSLVDVSYATSVVPQLLAHFLAEHKAIPFQSCAAQLFFSLALGGIEFVLLAVMAYDRYVAVCDALRYSAIMHGGLCARLAITSWVSGFISSPVQTAITFQLPMCRNKFIDHISCELLAVVRLACVDTSSNEVTIMVSSIVLLMTPFCLVLLSYIQIISTILKIQSREGRKKAFHTCASHLTVVALCYGVAIFTYIQPHSSPSVLQEKLFSVFYAILTPMLNPMIYSLRNKEVKGAWQKLLWKFSGLTSKLAT

SEQ ID NO: 355 - protein, 951 aa, Homo sapiens
MEIDNQTWVREFILLGLSSDWCTQISLFSLFLVTYLMTVLGNCLIVLLIRLDSRLHTPMYFFLTNLSLVDVSYATSVVPQLLAHFLAEHKAIPFQSCAAQLFFSLALGGIEFVLLAVMAYDRHVAVSDRLRYSAIMHGGLCARLAITSWVSGSINSLVQTAITFQLPMCTNKFIDHISCELLAVVRLACVDTSSNEAAIMVSSIVLLMTPFCLVLLSYIRIISTILKIQSREGRKKAFHTCASHLTVVALCYGTTIFTYIQPHSGPSVLQEKLISVFYAIVMPLLNPVIYSLRNKEVKGAWHKLLEKFSGLTSKLGTMEIDNQTWVREFILLGLSSDWCTQISLFSLFLVTYLMTVLGNCLIVLLIRLDSRLHTPMYFFLTNLSLVDVSYATSVVPQLLAHFLAEHKAIPFQSCAAQLFFSLALGGIEFVLLAVMAYDRHVAVSDRLRYSAIMHGGLCARLAITSWVSGSINSLVQTAITFQLPMCTNKFIDHISCELLAVVRLACVDTSSNEAAIMVSSIVLLMTPFCLVLLSYIRIISTILKIQSREGRKKAFHTCASHLTVVALCYGTTIFTYIQPHSGPSVLQEKLISVFYAIVMPLLNPVIYSLRNKEVKGAWHKLLEKFSGLTSKLGTMEIDNQTWVREFILLGLSSDWCTQISLFSLFLVTYLMTVLGNCLIVLLIRLDSRLHTPMYFFLTNLSLVDVSYATSVVPQLLAHFLAEHKAIPFQSCAAQLFFSLALGGIEFVLLAVMAYDRHVAVSDRLRYSAIMHGGLCARLAITSWVSGSINSLVQTAITFQLPMCTNKFIDHISCELLAVVRLACVDTSSNEAAIMVSSIVLLMTPFCLVLLSYIRIISTILKIQSREGRKKAFHTCASHLTVVALCYGTTIFTYIQPHSGPSVLQEKLISVFYAIVMPLLNPVIYSLRNKEVKGAWHKLLEKFSGLTSKLGT

SEQ ID NO: 356 - protein, 316 aa, Homo sapiens
MVNQSSPMGFLLLGFSEHPALERTLFVVVFTSYLLTLVGNTLIILLSVLYPRLHSPMYFFLSDLSFLDLCFTTSCVPQMLVNLWGPKKTISFLGCSVQLFIFLSLGTTECILLTVMAFDRYVAVCQPLHYATIIHPRLCWQLASVAWVMSLVQSIVQTPSTLHLPFCPHQQIDDFLCEVPSLIRLSCGDTSYNEIQLAVSSVIFVVVPLSLILASYGATAQAVLRINSATAWRKAFGTCSSHLTVVTLFYSSVIAVYLQPKNPYAQGRGKFFGLFYAVGTPSLNPLVYTLRNKEIKRALRRLLGKERDSRESWRAA

SEQ ID NO: 357 - protein, 312 aa, Homo sapiens
MVNQSSTPGFLLLGFSEHPGLERTLFVVVLTSYLLTLVGNTLIILLSALDPKLHSPMYFFLSNLSFLDLCFTTSCVPQMLVNLWGPKKTISFLDCSVQIFIFLSLGTTECILLTVMAFDRYVAVCQPLHYATIIHPRLCWQLASVAWVIGLVESVVQTPSTLHLPFCPDRQVDDFVCEVPALIRLSCEDTSYNEIQVAVASVFILVVPLSLILVSYGAITWAVLRINSAKGRRKAFGTCSSHLTVVTLFYSSVIAVYLQPKNPYAQERGKFFGLFYAVGTPSLNPLIYTLRNKEVTRAFRRLLGKEMGLTQS

SEQ ID NO: 358 - protein, 316 aa, Homo sapiens
MQGENFTIWSIFFLEGFSQYPGLEVVLFVFSLVMYLTTLLGNSTLILITILDSRLKTPMYLFLGNLSFMDICYTSASVPTLLVNLLSSQKTIIFSGCAVQMYLSLAMGSTECVLLAVMAYDRYVAICNPLRYSIIMNRCVCARMATVSWVTGCLTALLETSFALQIPLCGNLIDHFTCEILAVLKLACTSSLLMNTIMLVVSILLLPIPMLLVCISYIFILSTILRITSAEGRNKAFSTCGAHLTVVILYYGAALSMYLKPSSSNAQKIDKIISLLYGVLTPMLNPIIYSLRNKEVKDAMKKLLGKITLHQTHEHL

SEQ ID NO: 359 - protein, 319 aa, Homo sapiens
MEKANETSPVMGFVLLRLSAHPELEKTFFVLILLMYLVILLGNGVLILVTILDSRLHTPMYFFLGNLSFLDICFTTSSVPLVLDSFLTPQETISFSACAVQMALSFAMAGTECLLLSMMAFDRYVAICNPLRYSVIMSKAAYMPMAASSWAIGGAASVVHTSLAIQLPFCGDNVINHFTCEILAVLKLACADISINVISMEVTNVIFLGVPVLFISFSYVFIITTILRIPSAEGRKKVFSTCSAHLTVVIVFYGTLFFMYGKPKSKDSMGADKEDLSDKLIPLFYGVVTPMLNPIIYSLRNKDVKAAVRRLLRPKGFTQ

SEQ ID NO: 360 - protein, 315 aa, Homo sapiens
MGRWVNQSYTDGFFLLGIFSHSQTDLVLFSAVMVVFTVALCGNVLLIFLIYLDAGLHTPMYFFLSQLSLMDLMLVCNIVPKMAANFLSGRKSISFVGCGIQIGFFVSLVGSEGLLLGLMAYDRYVAVSHPLHYPILMNQRVCLQITGSSWAFGIIDGVIQMVAAMGLPYCGSRSVDHFFCEVQALLKLACADTSLFDTLLFACCVFMLLLPFSIIMASYACILGAVLRIRSAQAWKKALATCSSHLTAVTLFYGAAMFMYLRPRRYRAPSHDKVASIFYTVLTPMLNPLIYSLRNGEVMGALRKGLDRCRIGSQH

SEQ ID NO: 361 - protein, 315 aa, Homo sapiens
METWVNQSYTDGFFLLGIFSHSTADLVLFSVVMAVFTVALCGNVLLIFLIYMDPHLHTPMYFFLSQLSLMDLMLVCTNVPKMAANFLSGRKSISFVGCGIQIGLFVCLVGSEGLLLGLMAYDRYVAISHPLHYPILMNQRVCLQITGSSWAFGIIDGLIQMVVVMNFPYCGLRKVNHFFCEMLSLLKLACVDTSLFEKVIFACCVFMLLFPFSIIVASYAHILGTVLQMHSAQAWKKALATCSSHLTAVTLFYGAAMFIYLRPRHYRAPSHDKVASIFYTVLTPMLNPLIYSLRNREVMGALRKGLDRCRIGSQH

SEQ ID NO: 362 - protein, 314 aa, Homo sapiens
MGDVNQSVASDFILVGLFSHSGSRQLLFSLVAVMFVIGLLGNTVLLFLIRVDSRLHTPMYFLLSQLSLFDIGCPMVTIPKMASDFLRGEGATSYGGGAAQIFFLTLMGVAEGVLLVLMSYDRYVAVCQPLQYPVLMRRQVCLLMMGSSWVVGVLNASIQTSITLHFPYCASRIVDHFFCEVPALLKLSCADTCAYEMALSTSGVLILMLPLSLIATSYGHVLQAVLSMRSEEARHKAVTTCSSHITVVGLFYGAAVFMYMVPCAYHSPQQDNVVSLFYSLVTPTLNPLIYSLRNPEVWMALVKVLSRAGLRQMC

SEQ ID NO: 363 - protein, 323 aa, Homo sapiens
MWQKNQTSLADFILEGLFDDSLTHLFLFSLTMVVFLIAVSGNTLTILLICIDPQLHTPMYFLLSQLSLMDLMHVSTIILKMATNYLSGKKSISFVGCATQHFLYLCLGGAECFLLAVMSYDRYVAICHPLRYAVLMNKKVGLMMAVMSWLGASVNSLIHMAILMHFPFCGPRKVYHFYCEFPAVVKLVCGDITVYETTVYISSILLLLPIFLISTSYVFILQSVIQMRSSGSKRNAFATCGSHLTVVSLWFGACIFSYMRPRSQCTLLQNKVGSVFYSIITPTLNSLIYTLRNKDVAKALRRVLRRDVITQCIQRLQLWLPRV

SEQ ID NO: 364 - protein, 309 aa, Homo sapiens
MKNKTVLTEFILLGLTDVPELQVAVFTFLFLAYLLSILGNLTILILTLLDSHLQTPMYFFLRNFSFLEISFTNIFIPRVLISITTGNKSISFAGCFTQYFFAMFLGATEFYLLAAMSYDRYVAICKPLHYTTIMSSRICIQLIFCSWLGGLMAIIPTITLMSQQDFCASNRLNHYFCDYEPLLELSCSDTSLIEKVVFLVASVTLVVTLVLVILSYAFIIKTILKLPSAQQRTKAFSTCSSHMIVISLSYGSCMFMYINPSAKEGDTFNKGVALLITSVAPLLNPFIYTLRNQQVKQPFKDMVKKLLNL

SEQ ID NO: 365 - protein, 320 aa, Homo sapiens
MDATACNESVDGSPVFYLLGIPSLPETFFLPVFFIFLLFYLLILMGNALILVAVVAEPSLHKPMYFFLINLSTLDILFTTTTVPKMLSLFLLGDRFLSFSSCLLQMYLFQSFTCSEAFILVVMAYDRYVAICHPLHYPVLMNPQTNATLAASAWLTALLLPIPAVVRTSQMAYNSIAYIYHCFCDHLAVVQASCSDTTPQTLMGFCIAMVVSFLPLLLVLLSYVHILASVLRISSLEGRAKAFSTCSSHLLVVGTYYSSIAIAYVAYRADLPLDFHIMGNVVYAILTPILNPLIYTLRNRDVKAAITKIMSQDPGCDRSI

SEQ ID NO: 366 - protein, 315 aa, Homo sapiens
MQPESGANGTVIAEFILLGLLEAPGLQPVVFVLFLFAYLVTVRGNLSILAAVLVEPKLHTPMYFFLGNLSVLDVGCISVTVPSMLSRLLSRKRAVPCGACLTQLFFFHLFVGVDCFLLTAMAYDRFLAICRPLTYSTRMSQTVQRMLVAASWACAFTNALTHTVAMSTLNFCGPNVINHFYCDLPQLFQLSCSSTQLNELLLFAVGFIMAGTPMALIVISYIHVAAAVLRIRSVEGRKKAFSTCGSHLTVVAIFYGSGIFNYMRLGSTKLSDKDKAVGIFNTVINPMLNPIIYSFRNPDVQSAIWRMLTGRRSLA

SEQ ID NO: 367 - protein, 315 aa, Homo sapiens
MEPEAGTNRTAVAEFILLGLVQTEEMQPVVFVLLLFAYLVTTGGNLSILAAVLVEPKLHAPMYFFLGNLSVLDVGCITVTVPAMLGRLLSHKSTISYDACLSQLFFFHLLAGMDCFLLTAMAYDRLLAICQPLTYSTRMSQTVQRMLVAASWACAFTNALTHTVAMSTLNFCGPNEVNHFYCDLPQLFQLSCSSTQLNELLLFVAAAFMAVAPLVFISVSYAHVVAAVLQIRSAEGRKKAFSTCGSHLTVVGIFYGTGVFSYMRLGSVESSDKDKGVGVFMTVINPMLNPLIYSLRNTDVQGALCQLLVGKRSLT

SEQ ID NO: 368 - protein, 315 aa, Homo sapiens
MRQNNNITEFVLLGFSQDPGVQKALFVMFLLTYLVTVVGNLLIVVDIIASPSLGSPMYFFLACLSFIDAAYSTTISPKLIVGLFCDKKTISFQGCMGQLFIDHFFGGAEVFLLVVMACDRYVAICKPLHYLTIMNRQVCFLLLVVAMIGGFVHSAFQIVVYSLPFCGPNVIVHFSCDMHPLLELACTDTYFIGLTVVVNSGAICMVIFNLLLISYGVILSSLKTYSQEKRGKALSTCSSGSTVVVLFFVPCIFIYVRPVSNFPTDKFMTVFYTIITHMLSPLIYTLRNSEMRNAIEKLLGKKLTIFIIGGVSVLM

SEQ ID NO: 369 - protein, 344 aa, Homo sapiens
MELLTNNLKFITDPFVCRLRHLSPTPSEEHMKNKNNVTEFILLGLTQNPEGQKVLFVTFLLIYMVTIMGNLLIIVTIMASQSLGSPMYFFLASLSFIDTVYSTAFAPKMIVDLLSEKKTISFQGCMAQLFMDHLFAGAEVILLVVMAYDRYMAICKPLHELITMNRRVCVLMLLAAWIGGFLHSLVQFLFIYQLPFCGPNVIDNFLCDLYPLLKLACTNTYVTGLSMIANGGAICAVTFFTILLSYGVILHSLKTQSLEGKRKAFYTCASHVTVVILFFVPCIFLYARPNSTFPIDKSMTVVLTFITPMLNPLIYTLKNAEMKSAMRKLWSKKVSLAGKWLYHS

SEQ ID NO: 370 - protein, 309 aa, Homo sapiens
MEPRKNVTDFVLLGFTQNPKEQKVLFVMFLLFYILTMVGNLLIVVTVTVSETLGSPMYFFLAGLSFIDIIYSSSISPRLISGLFFGNNSISFQSCMAQLFIEHIFGGSEVFLLLVMAYDCYVAICKPLHYLVIMRQWVCVVLLVVSWVGGFLHSVFQLSIIYGLPFCGPNVIDHFFCDMYPLLKLVCTDTHAIGLLVVANGGLACTIVFLLLLISYGVILHSLKNLSQKGRQKALSTCSSHMTVVVFFFVPCIFMYARPARTFPIDKSVSVFYTVITPMLNPLIYTLRNSEMTSAMKKLWRRDLISSST

SEQ ID NO: 371 - protein, 309 aa, Homo sapiens
MASTSNVTELIFTGLFQDPAVQSVCFVVFLPVYLATVVGNGLIVLTVSISKSLDSPMYFFLSCLSLVEISYSSTIAPKFIIDLLAKIKTISLEGCLTQIFFFHFFGVAEILLIVVMAYDCYVAICKPLHYMNIISRQLCHLLVAGSWLGGFCHSIIQILVIIQLPFCGPNVIDHYFCDLQPLFKLACTDTFMEGVIVLANSGLFSVFSFLILVSSYIVILVNLRNHSAEGRHKALSTCASHITVVILFFGPAIFLYMRPSSTFTEDKLVAVFYTVITPMLNPIIYTLRNAEVKIAIRRLWSKKENPGRE

SEQ ID NO: 372 - protein, 302 aa, Homo sapiens
MDIPQNITEFFMLGLSQNSEVQRVLFVVFLLIYVVTVCGNMLIVVTITSSPTLASPVYFFLANLSFIDTFYSSSMAPKLIADSLYEGRTISYECCMAQLFGAHFLGGVEIILLTVMAYDRYVAICKPLHNTTIMTRHLCAMLVGVAWLGGFLHSLVQLLLVLWLPFCGPNVINHFACDLYPLLEVACTNTYVIGLLVVANSGLICLLNFLMLAASYIVILYSLRSHSADGRCKALSTCGAHFIVVALFFVPCIFTYVHPFSTLPIDKNMALFYGILTPMLNPLIYTLRNEEVKNAMRKLFTW

SEQ ID NO: 373 - protein, 309 aa, Homo sapiens
MENQNNVTEFILLGLTENLELWKIFSAVFLVMYVATVLENLLIVVTIITSQSLRSPMYFFLTFLSLLDVMFSSVVAPKVIVDTLSKSTTISLKGCLTQLFVEHFFGGVGIILLTVMAYDRYVAICKPLHYTIIMSPRVCCLMVGGAWVGGFMHAMIQLLFMYQIPFCGPNIIDHFICDLFQLLTLACTDTHILGLLVTLNSGMMCVAIFLILIASYTVILCSLKSYSSKGRHKALSTCSSHLTVVVLFFVPCIFLYMRPVVTHPIDKAMAVSDSIITPMLNPLIYTLRNAEVKSAMKKLWMKWEALAGK

SEQ ID NO: 374 - protein, 310 aa, Homo sapiens
MQQNNSVPEFILLGLTQDPLRQKIVFVIFLIFYMGTVVGNMLIIVTIKSSRTLGSPMYFFLFYLSFADSCFSTSTAPRLIVDALSEKKIITYNECMTQVFALHLFGCMEIFVLILMAVDRYVAICKPLRYPTIMSQQVCIILIVLAWIGSLIHSTAQIILALRLPFCGPYLIDHYCCDLQPLLKLACMDTYMINLLLVSNSGAICSSSFMILIISYIVILHSLRNHSAKGKKKALSACTSHIIVVILFFGPCIFIYTRPPTTFPMDKMVAVFYTIGTPFLNPLIYTLRNAEVKNAMRKLWHGKIISENKG

SEQ ID NO: 375 - protein, 309 aa, Homo sapiens
MEKKKNVTEFILIGLTQNPIMEKVTFVVFLVLYMITLSGNLLIVVTITTSQALSSPMYFFLTHLSLIDTVYSSSSAPKLIVDSFQEKKIISFNGCMAQAYAEHIFGATEIILLTVMACDCYVAICKPLNYTTIMSHSLCILLVAVAWVGGFLHATIQILFTVWLPFCGPNVIGHFMCDLYPLLKLVCIDTHTLGLFVAVNSGFICLLNFLILVVSYVIILRSLKNNSLEGRCKALSTCISHIIVVVLFFVPCIFVYLRSVTTLPIDKAVAVFYTMVVPMLNPVVYTLRNAEVKSAIRKLWRKKVTSDND

SEQ ID NO: 376 - protein, 310 aa, Homo sapiens
MQLNNNVTEFILLGLTQDPFWKKIVFVIFLRLYLGTLLGNLLIIISVKTSQALKNPMFFFLFYLSLSDTCLSTSITPRMIVDALLKKTTISFSECMIQVFSSHVFGCLEIFILILTAVDRYVDICKPLHYMTIISQWVCGVLMAVAWVGSCVHSLVQIFLALSLPFCGPNVINHCFCDLQPLLKQACSETYVVNLLLVSNSGAICAVSYVMLIFSYVIFLHSLRNHSAEVIKKALSTCVSHIIVVILFFGPCIFMYTCLATVFPMDKMIAVFYTVGTSFLNPVIYTLKNTEVKSAMRKLWSKKLITDDKR

SEQ ID NO: 377 - protein, 309 aa, Homo sapiens
MENRNNMTEFVLLGLTENPKMQKIIFVVFFVIYIITVVGYVLIVVTITASPSLGSPMYLSLAYLSFIDACYSSVNTPNLITHSLYGKKAILFNGCMTQVFGEHFFGGAEGILLTVMAYDHYVAICKPLHYMTIMNQCVCALLMGVVWMGGFLHATIQILFIFQLPFCGPNVIDHFMCDLNPLLNLACTDTHMLELFIAANSGFICLLNFALLLVSYVVILCSLRTHSLEARHKALSTCVSHITVVILFFVPCIFVYMRPAATLPIDKAVAIFYTMITPMLNPLIYTLKNAQMKNAIRKLCSRKDISGDK

SEQ ID NO: 378 - protein, 310 aa, Homo sapiens
MEPQNTTQVSMFVLLGFSQTQELQKFLFLLFLLVYVTTIVGNLLIMVTVTFDCRLHTPMYFLLRNLALIDLCYSTVTSPKMLVDFLHETKTISYQGCMAQIFFFHLLGGGTVFFLSVMAYDRYIAISQPLRYVTIMNTQLCVGLVVAAWVGGFVHSIVQLALILPLPFCGPNILDNFYCDVPQVLRLACTDTSLLEFLMISNSGLLVIIWFLLLLISYTVILVMLRSHSGKARRKAASTCTTHIIVVSMIFIPCIYIYTWPFTPFLMDKAVSISYTVMTPMLNPMIYTLRNQDMKAAMRRLGKCLVICRE

SEQ ID NO: 379 - protein, 307 aa, Homo sapiens
METGNLTWVSDFVFLGLSQTRELQRFLFLMFLFVYITTVMGNILIIITVTSDSQLHTPMYFLLRNLAVLDLCFSSVTAPKMLVDLLSEKKTISYQGCMGQIFFFHFLGGAMVFFLSVMAFDRLIAISRPLRYVTVMNTQLWVGLVVATWVGGFVHSIVQLALMLPLPFCGPNILDNFYCDVPQVLRLACTDTSLLEFLKISNSGLLDVVWFFLLLMSYLFILVMLRSHPGEARRKAASTCTTHIIVVSMIFVPSIYLYARPFTPFPMDKLVSIGHTVMTPMLNPMIYTLRNQDMQAAVRRLGRHRLV

SEQ ID NO: 380 - protein, 314 aa, Homo sapiens
MDQRNYTRVKEFTFLGITQSRELSQVLFTFLFLVYMTTLMGNFLIMVTVTCESHLHTPMYFLLRNLSILDICFSSITAPKVLIDLLSETKTISFSGCVTQMFFFHLLGGADVFSLSVMAFDRYIAISKPLHYMTIMSRGRCTGLIVASWVGGFVHSIAQISLLLPLPFCGPNVLDTFYCDVPQVLKLACTDTFTLELLMISNNGLVSWFVFFFLLISYTVILMMLRSHTGEGRRKAISTCTSHITVVTLHFVPCIYVYARPFTALPTDTAISVTFTVISPLLNPIIYTLRNQEMKLAMRKLKRRLGQSERILIQ

SEQ ID NO: 381 - protein, 311 aa, Homo sapiens
MELGNVTRVKEFIFLGLTQSQDQSLVLFLFLCLVYMTTLLGNLLIMVTVTCESRLHTPMYFLLRNLAILDICFSSTTAPKVLLDLLSKKKTISYTSCMTQIFLFHLLGGADIFSLSVMAFDCYMAISKPLHYVTIMSRGQCTALISASWMGGFVHSIVQISLLLPLPFCGPNVLDTFYCDVPQVLKLTCTDTFALEFLMISNNGLVTTLWFIFLLVSYTVILMTLRSQAGGGRRKAISTCTSHITVVTLHFVPCIYVYARPFTALPTEKAISVTFTVISPLLNPLIYTLRNQEMKSAMRRLKRRLVPSERE

SEQ ID NO: 382 - protein, 305 aa, Homo sapiens
MVTEFIFLGLSDSQGLQTFLFMLFFVFYGGIVFGNLLIVITVVSDSHLHSPMYFLLANLSLIDLSLSSVTAPKMITDFFSQRKVISFKGCLVQIFLLHFFGGSEMVILIAMGFDRYIAICKPLHYTTIMCGNACVGIMAVAWGIGFLHSVSQLAFAVHLPFCGPNEVDSFYCDLPRVIKLACTDTYRLDIMVIANSGVLTVCSFVLLIISYTIILMTIQHRPLDKSSKALSTLTAHITVVLLFFGPCVFIYAWPFPIKSLDKFLAVFYSVITPLLNPIIYTLRNKDMKTAIRQLRKWDAHSSVKF

SEQ ID NO: 383 - protein, 312 aa, Homo sapiens
MDGENHSVVSEFLFLGLTHSWEIQLLLLVFSSVLYVASITGNIFIVFSVTTDPHLHSPMYFLLASLSFIDLGACSVTSPKMIYDLFRKRKVISFGGCIAQIFFIHVIGGVEMVLLIAMAFDRYVALCKPLHYLTIMSPRMCLSFLAVAWTLGVSHSLFQLAFLVNLAFCGPNVLDSFYCDLPRLLRLACTDTYRLQFMVTVNSGFICVGTFFILLISYVFILFTVWKHSSGGSSKALSTLSAHSTVVLLFFGPPMFVYTRPHPNSQMDKFLAIFDAVLTPFLNPVVYTFRNKEMKAAIKRVCKQLVIYKKIS

SEQ ID NO: 384 - protein, 312 aa, Homo sapiens
MEKSNNSTLFILLGFSQNKNIEVLCFVLFLFCYIAIWMGNLLIMISITCTQLIHQPMYFFLNYLSLSDLCYTSTVTPKLMVDLLAERKTISYNNCMIQLFTTHFFGGIEIFILTGMAYDRYVAICKPLHYTIIMSRQKCNTIIIVCCTGGFIHSASQFLLTIFVPFCGPNEIDHYFCDVYPLLKLACSNIHMIGLLVIANSGLIALVTFVVLLLSYVFILYTIRAYSAERRSKALATCSSHVIVVVLFFAPALFIYIRPVTTFSEDKVFALFYTIIAPMFNPLIYTLRNTEMKNAMRKVWCCQILLKRNQLF

SEQ ID NO: 385 - protein, 305 aa, Homo sapiens
MVATNNVTEIIFVGFSQNWSEQRVISVMFLLMYTAVVLGNGLIVVTILASKVLTSPMYFFLSYLSFVEICYCSVMAPKLIFDSFIKRKVISLKGCLTQMFSLHFFGGTEAFLLMVMAYDRYVAICKPLHYMAIMNQRMCGLLVRIAWGGGLLHSVGQTFLIFQLPFCGPNIMDHYFCDVHPVLELACADTFFISLLIITNGGSISVVSFFVLMASYLIILHFLRSHNLEGQHKALSTCASHVTVVDLFFIPCSLVYIRPCVTLPADKIVAVFYTVVTPLLNPVIYSFRNAEVKNAMRRFIGGKVI

SEQ ID NO: 386 - protein, 303 aa, Homo sapiens
MTEFIFLVLSPNQEVQRVCFVIFLFLYTAIVLGNFLIVLTVMTSRSLGSPMYFFLSYLSFMEICYSSATAPKLISDLLAERKVISWWGCMAQLFFLHFFGGTEIFLLTVMAYDHYVAICKPLSYTTIMNWQVCTVLVGIAWVGGFMHSFAQILLIFHLLFCGPNVINHYFCDLVPLLKLACSDTFLIGLLIVANGGTLSVISFGVLLASYMVILLHLRTWSSEGWCKALSTCGSHFAVVILFFGPCVFNSLRPSTTLPIDKMVAVFYTVITAILNPVIYSLRNAEMRKAMKRLWIRTLRLNEK

SEQ ID NO: 387 - protein, 309 aa, Homo sapiens
MENCTEVTKFILLGLTSVPELQIPLFILFTFIYLLTLCGNLGMMLLILMDSCLHTPMYFFLSNLSLVDFGYSSAVTPKVMAGFLRGDKVISYNACAVQMFFFVALATVENYLLASMAYDRYAAVCKPLHYTTTMTASVGACLALGSYVCGFLNASFHIGGIFSLSFCKSNLVHHFFCDVPAVMALSCSDKHTSEVILVFMSSFNIFFVLLVIFISYLFIFITILKMHSAKGHQKALSTCASHFTAVSVFYGTVIFIYLQPSSSHSMDTDKMASVFYAMIIPMLNPVVYSLRNREVQNAFKKVLRRQKFL

SEQ ID NO: 388 - protein, 314 aa, Homo sapiens
MENNTEVTEFILVGLTDDPELQIPLFIVFLFIYLITLVGNLGMIELILLDSCLHTPMYFFLSNLSLVDFGYSSAVTPKVMVGFLTGDKFILYNACATQFFFFVAFITAESFLLASMAYDRYAALCKPLHYTTTMTTNVCACLAIGSYICGFLNASIHTGNTFRLSFCRSNVVEHFFCDAPPLLTLSCSDNYISEMVIFFVVGFNDLFSILVILISYLFIFITIMKMRSPEGRQKAFSTCASHLTAVSIFYGTGIFMYLRPNSSHFMGTDKMASVFYAIVIPMLNPLVYSLRNKEVKSAFKKTVGKAKASIGFIF

SEQ ID NO: 389 - protein, 314 aa, Homo sapiens
MENNTEVSEFILLGLTNAPELQVPLFIMFTLIYLITLTGNLGMIILILLDSHLHTPMYFFLSNLSLAGIGYSSAVTPKVLTGLLIEDKAISYSACAAQMFFCAVFATVENYLLSSMAYDRYAAVCNPLHYTTTMTTRVCACLAIGCYVIGFLNASIQIGDTFRLSFCMSNVIHHFFCDKPAVITLTCSEKHISELILVLISSFNVFFALLVTLISYLFILITILKRHTGKGYQKPLSTCGSHLIAIFLFYITVIIMYIRPSSSHSMDTDKIASVFYTMIIPMLSPIVYTLRNKDVKNAFMKVVEKAKYSLDSVF

SEQ ID NO: 390 - protein, 313 aa, Homo sapiens
MEEENATLLTEFVLTGFLYQPQWKIPLFLAFLVIYLITIMGNLGLIAVIWKDPHLHIPMYLLLGNLAFVDAWISSTVTPKMLNNFLAKSKMISLSECKIQFFSFAISVTTECFLLATMAYDRYVAICKPLLYPAIMTNGLCIRLLILSYVGGILHALIHEGFLFRLTFCNSNIVHHIYCDTIPLSKISCTDSSINFLMVFIFSGSIQVFSIVTILVSYTFVLFAILKKKSDKGVRKAFSTCGAHLFSVSLYYGPLLFIYVGPASPQADDQDMVEPLFYTVIIPLLNPIIYSLRNKQVTVSFTKMLKKHVKVSY

SEQ ID NO: 391 - protein, 309 aa, Homo sapiens
MEQDNTTLLTEFVLTGLTYQPEWKMPLFLVFLVIYLITIVWNLGLIALIWNDPQLHIPMYFFLGSLAFVDAWISSTVTPKMLVNFLAKNRMISLSECMIQFFSFAFGGTTECFLLATMAYDRYVAICKPLLYPVIMNNSLCIRLLAFSFLGGFLHALIHEVLIFRLTFCNSNIIHHFYCDIIPLFMISCTDPSINFLMVFILSGSIQVFTIVTVLNSYTFALFTILKKKSVRGVRKAFSTCGAHLLSVSLYYGPLIFMYLRPASPQADDQDMIDSVFYTIIIPLLNPIIYSLRNKQVIDSFTKMVKRNV

SEQ ID NO: 392 - protein, 309 aa, Homo sapiens
MEEENATLLTEFVLTGFLHQPDCKIPLFLAFLVIYLITIMGNLGLIVLIWKDPHLHIPMYLFLGSLAFVDASLSSTVTPKMLINFLAKSKMISLSECMVQFFSLVTTVTTECFLLATMAYDRYVAICKALLYPVIMTNELCIQLLVLSFIGGLLHALIHEAFSFRLTFCNSNIIQHFYCDIIPLLKISCTDSSINFLMVFIFAGSVQVFTIGTILISYTIILFTILEKKSIKGIRKAVSTCGAHLLSVSLYYGPLTFKYLGSASPQADDQDMMESLFYTVIVPLLNPMIYSLRNKQVIASFTKMFKSNV

SEQ ID NO: 393 - protein, 310 aa, Homo sapiens
MEEENATLLTEFVLTGFLYQPQWKIPLFLAFLVIYLITIMGNLGLIAVIWKDPHLHIPMYLLLGNLAFVDALLSSSVTLKMLINFLAKSKMISLSECKIQLFSFAISVTTECFLLATMAYDRYVAICKPLLYPAIMTNGLCIRLLILSYVGGLLHALIHEGFLFRLTFCNSNIIQHFYCDIIPLLKISYTDSSINFLMVFIFAGSIQVFTIGTVLISYIFVLYTILKKKSVKGMRKAFSTCGAHLLSVSLYYGPLAFMYMGSASPQADDQDMMESLFYTVIVPLLNPMIYSLRNKQVIASFTKMFKRNDV

SEQ ID NO: 394 - protein, 321 aa, Homo sapiens
MNKENHSLIAEFILTGFTYHPKLKTVLFVVFFAIYLITMVGNIGLVALIYIEQRLHTPMYIFLGNLVLMDSCCSSAITPKMLENFFSEDKRITLYECMAQFYFLCLAETTDCFLLAAMAYDCYVAICNPLQYHTMMSKTLCIQMTAGAYLAGNLHPMIEVEFLLRLTFCGSHQINHFFCDVLPLYRLSCINPYINELVLFILAGSIQIFTIVLVSYFYILFTIFTMKSKEGRGKALSTCASHFLSVSIFCDSLLFMYARPGAVNEGDKDIPVAIFYTLVIPLLNPFIYSLRNKEVINIMKKIMKKRKFCHILKQMSSPLAT

SEQ ID NO: 395 - protein, 309 aa, Homo sapiens
MTLGNSTEVTEFYLLGFGAQHEFWCILFIVFLLIYVTSIMGNSGIILLINTDSRFQTLTYFFLQHLAFVDICYTSAITPKMLQSFTEEKNLMLFQGCVIQFLVYATFATSDCYLLAMMAVDPYVAICKPLHYTVIMSRTVCIRLVAGSYIMGSINASVQTGFTCSLSFCKSNSINHFFCDVPPILALSCSNVDINIMLLVVFVGSNLIFTGLVVIFSYIYIMATILKMSSSAGRKKSFSTCASHLTAVTIFYGTLSYMYLQSHSNNSQENMKVAFIFYGTVIPMLNPLIYSLRNKEVKEALKVIGKKLF

SEQ ID NO: 396 - protein, 310 aa, Homo sapiens
MDKENSSMVTEFIFMGITQDPQMEIIFFVVFLIVYLVNVVGNIGMIILITTDTQLHTPMYFFLCNLSFVDLGYSSAIAPRMLADFLTNHKVISFSSCATQFAFFVGFVDAECYVLAAMAYGRFVAICRPLHYSTFMSKQVCLALMLGSYLAGLVSLVAHTTLTFSLSYCGSNIINHFFCEIPPLLALSCSDTYISEILLFSLCGFIEFSTILIIFISYTFILVAIIRMRSAEGRLKAFSTCGSHLTGITLFYGTVMFMYLRPTSSYSLDQDKWASVFYTVIIPMLNPLIYSLRNKDVKAAFKKLIGKKSQ

SEQ ID NO: 397 - protein, 324 aa, Homo sapiens
MLESNYTMPTEFLFVGFTDYLPLRVTLFLVFLLVYTLTMVGNILLIILVNINSSLQIPMYYFLSNLSFLDISCSTAITPKMLANFLASRKSISPYGCALQMFFFASFADAECLILAAMAYDRYAAICNPLLYTTLMSRRVCVCFIVLAYFSGSTTSLVHVCLTFRLSFCGSNIVNHFFCDIPPLLALSCTDTQINQLLLFALCSFIQTSTFVVIFISYFCILITVLSIKSSGGRSKTFSTCASHLIAVTLFYGALLFMYLQPTTSYSLDTDKVVAVFYTVVFPMFNPIIYSFRNKDVKNALKKLLERIGYSNEWYLNRLRIVNI

SEQ ID NO: 398 - protein, 311 aa, Homo sapiens
MELENQTRVTKFILVGFPGSLSMRAAMFLIFLVAYILTVAENVIIILLVLQNRPLHKPMYFFLANLSFLETWYISVTVPKLLFSFWSVNNSISFTLCMIQLYFFIALMCTECVLLAAMAYDRYVAICRPLHYPTIMSHGLCFRLALGSWAIGFGISLAKIYFISCLSFCGPNVINHFFCDISPVLNLSCTDMSITELVDFILALVIFLFPLFITVLSYGCILATILCMPTGKQKAFSTCASHLVVVTIFYSAIIFMYARPRVIHAFNMNKIISIFYAIVTPSLNPFIYCLRNREVKEALKKLAYCQASRSD

SEQ ID NO: 399 - protein, 331 aa, Homo sapiens
MSGENVTRVGTFILVGFPTAPGLQYLLFLLFLLTYLFVLVENLAIILTVWSSTSLHRPMYYFLSSMSFLEIWYVSDITPKMLEGFLLQQKRISFVGCMTQLYFFSSLVCTECVLLASMAYDRYVAICHPLRYHVLVTPGLCLQLVGFSFVSGFTISMIKVCFISSVTFCGSNVLNHFFCDISPILKLACTDFSTAELVDFILAFIILVFPLLATMLSYAHITLAVLRIPSATGCWRAFFTCASHLTVVTVFYTALLFMYVRPQAIDSRSSNKLISVLYTVITPILNPLIYCLRNKEFKNALKKAFGLTSCAVEGRLSSLLELHLQIHSQPL

SEQ ID NO: 400 - protein, 312 aa, Homo sapiens
MKNHTVIRTFILLGLTGDPHLQVLLFIFLFLTYMLSVTGNLTIITLTLVDHHLKTPMYFFLRNFSFLEVSFTTVCIPRFLYNISMGDNTITYNACASQIFFVILFGATEFFLLAAMSYDRYVAICKPLHYVVIMNNRVCTLLVLCCWVAGLMIIVPPLSLGLQLEFCDSNAIDHFSCDAGPLLKISCSDTWVIEQMVILMAVFALIITLVCVILSYLYIVRTILKFPSVQQRKKAFSTCSSHMIVVSIAYGSCIFIYIKPSAKDEVAINKGVSVLTTSVAPLLNPFIYTLRNKQVKQAFSDSIKRIAFLSKK

SEQ ID NO: 401 - protein, 311 aa, Homo sapiens
MNHTMVTEFVLLGLSDDPDLQIVIFLFLFITYILSVTGNLTIITLTFVDSHLQTPMYFFLRNFSFLEISFTTVCIPRFLGAIITRNKTISYNNCAAQLFFFIFMGVTEFYILTAMSYDRYVAICKPLHYTSIMNRKLCTLLVLCAWLSGFLTIFPPLMLLLQLDYCASNVIDHFACDYFPLLQLSCSDTWLLEVIGFYFALVTLLFTLALVILSYMYIIRTILRIPSASQRKKAFSTCSSHMIVISISYGSCIFMYANPSAKEKASLTKGIAILNTSVAPMLNPFIYTLRNQQVKQAFKNVVHKVVFYANQ

SEQ ID NO: 402 - protein, 309 aa, Homo sapiens
MKNRTMFGEFILLGLTNQPELQVMIFIFLFLTYMLSILGNLTIITLTLLDPHLQTPMYFFLRNFSFLEISFTSIFIPRFLTSMTTGNKVISFAGCLTQYFFAIFLGATEFYLLASMSYDRYVAICKPLHYLTIMSSRVCIQLVFCSWLGGFLAILPPIILMTQVDFCVSNILNHYYCDYGPLVELACSDTSLLELMVILLAVVTLMVTLVLVTLSYTYIIRTILRIPSAQQRTKAFSTCSSHMIVISLSYGSCMFMYINPSAKEGGAFNKGIAVLITSVTPLLNPFIYTLRNQQVKQAFKDSVKKIVKL

SEQ ID NO: 403 - protein, 314 aa, Homo sapiens
MKNKSMEIEFILLGLTDDPQLQIVIFLFLFLNYTLSLMGNLIIIILTLLDPRLKTPMYFFLRNFSFLEVIFTTVCIPRFLITIVTRDKTISYNNCATQLFFILLPGVTEFYLLAAMSYDRYVAICKPLHYPIIMSSKVCYQLVLSSWVTGFLIIFPPLVMGLKLDFCASKTIDHFMCETSPILQISCTDTHVLELMSFTLAVVTLVVTLVLVILSYTCIIKTILKFSSAQQRNKAFSTCTSHMIVVSMTYGSCIFMYIKPSAKERVTVSKGVALLYTSIAPLLNPFIYTLRNQQVKEVFWDVLQKNLCFSKRPF

SEQ ID NO: 404 - protein, 312 aa, Homo sapiens
MPNMTSIREFILLGFTDNPELQVVIFFFMLITYLLSVSGNMIIIMLTLSNIHLKTPMYFFLRNFSFLEISFTTVFIPRFLINIATGDTTISYNASMAQVFFLILLGSTEFFLLAVMSYDRYVAICKPLHYTTIMSNKVCNWLVISSWLAGFLIIFPPVIMGLQLDFCDSSTIDHFICDSSPMLLIACTDTQFLELMAFLLAVFTLMVTLALVVLSYTLILKTILKIPSAQQRKKAFSTCSSHMIVVSVSYGSCIFMCVKTSAKEGMALSKGVAVLNTSVAPMLNPFIYTLRNQQVKQALREFTKKILSLNKQ

SEQ ID NO: 405 - protein, 312 aa, Homo sapiens
MRKHTAITTFILLGLTEDPQLQVLLFMFLFITYMLSVTGKLTIIALTMLDPHLKTPMYFFLQNLSFLEISFTATCVPRFLYSISTGNKIITYNACVIQLFFADLFGVTEFFLLATMSYDRYVAICKPLHYMAIMSNKVCKTMVICCWMAALMIILPPLSLGFHLEFCDSNVINHFGCDALPILKIPCSDTSLIEQMVVASAVLTFIITLVCVVLSYTYIIRTILKFPSVQQKKKAFSTCSSHITVVSITYGSCIFIYIKPSAKEEVNINKGVSVLISSISPMLNSFIYTLRNEQVKQAFHDSLKKIAFRLKK

SEQ ID NO: 406 - protein, 312 aa, Homo sapiens
MKNHTRQIEFILLGLTDNSQLQIVIFLFLLLNCVLSMIGNFTIIALILLDSQLKTPMYFFLRNFSFLEISFTTACIPRFLITIVTREKTISCNGCISQLFFYIFLGVTEFFLLAALSYDRYVAICKPLRYMSIMSNKVCYQLVFSSWVTGFLIIFTPLILGLNLDFCASNIIDHFICDISLILQLSCSDTHLLELIAFLLAVMTLIVTLFLVILSYSYIIKTILKFPSAQQKKKAFSTCSSHMIVVSITYGSCMFIYIKPSANERVALSKGVTVLNTSVAPLLNPFIYTLRNQQVKQAFKAVFRKIFSASDK

SEQ ID NO: 407 - protein, 312 aa, Homo sapiens
MRNHTTVANFILLGLTDDPQLQVIIFLLLFFTYMLSITGNLTIITLTLLDLHLKTPMYFFLRNFSFLEVSFTTVYIPKFLVSMATGDKTISYNDCAAQLFFTILLGATEFFLLAAMSYERYVAICKPLHYTTIMSSRVCSLLVFASWMAGFLIIFPPLLMGLQLDFCAANTVDHFFCDVSPILQLSCTDTDIIELMMLLSAILTLLVTLVLVILSYTNIIRTILKIPSSQQRKKAFSTCSSHMVVVSISYGSCIFMYVKPSAKERVSLNKGIALLSTSVAPMLNPFIYTLRNKQVKDVFKHTVKKIELFSMK

SEQ ID NO: 408 - protein, 312 aa, Homo sapiens
MRNSTAVTDFILLGLTSDPQWQVVLFIFLLVTYMLSVTGNLIIITLTLSDPHLQTPMYFFLRNFSFLEISFTSVCIPRFLVTVVTGNRTISYNGCVAQLFFFIFLGVTEFYLLAAMSYDRCMAICKPLHYTIIMSTRVCTLLVFSSWLAGFLIIFPPVMLLLQLDFCASNVIDHFICDSSPMLQLSCTNTHFLELMAFFLAVVTLMVTLTLVILSYTNIIRTILKIPSMSQRKKAFSTCSSHMIVVSISYSSCIFMYIKTSARERVTLSKGVAVLNTSVAPLLNPFIYTLRNKQVKQAFKSMVQKMIFSLNK

SEQ ID NO: 409 - protein, 312 aa, Homo sapiens
MKNRTSVTDFILLGLTDNPQLQVVIFSFLFLTYVLSVTGNLTIISLTLLDSHLKTPMYFFLRNFSLEISFTSVCNPRFLISILTGDKSISYNACAAQLFFFIFLGSTEFFLLASMSYDCYVAICKPLHYTTIMSDRICYQLIISSWLAGFLVIFPPLAMGLQLDFCDSNVIDHFTCDSAPLLQISCTDTSTLELMSFILALFTLISTLILVILSYTYIIRTILRIPSAQQRKKAFSTCSSHVIVVSISYGSCIFMYVKTSAKEGVALTKGVAILNTSVAPMLNPFIYTLRNQQVKQAFKDVLRKISHKKKKH

SEQ ID NO: 410 - protein, 315 aa, Homo sapiens
MESGNQSTVTEFIFTGFPQLQDGSLLYFFPLLFIYTFIIIDNLLIFSAVRLDTHLHNPMYNFISIFSFLEIWYTTATIPKMLSNLISEKKAISMTGCILQMYFFHSLENSEGILLTTMAIDRYVAICNPLRYQMIMTPRLCAQLSAGSCLFGFLILLPEIVMISTLPFCGPNQIHQIFCDLVPVLSLACTDTSMILIEDVIHAVTIIITFLIIALSYVRIVTVILRIPSSEGRQKAFSTCAGHLMVFPIFFGSVSLMYLRFSDTYPPVLDTAIALMFTVLAPFFNPIIYSLRNKDMNNAIKKLFCLQKVLNKPGG

SEQ ID NO: 411 - protein, 343 aa, Homo sapiens
MKQYSVGNQHSNYRSLLFPFLCSQMTQLTASGNQTMVTEFLFSMFPHAHRGGLLFFIPLLLIYGFILTGNLIMFIVIQVGMALHTPLYFFISVLSFLEICYTTTTIPKMLSCLISEQKSISVAGCLLQMYFFHSLGITESCVLTAMAIDRYIAICNPLRYPTIMIPKLCIQLTVGSCFCGFLLVLPEIAWISTLPFCGSNQIHQIFCDFTPVLSLACTDTFLVVIVDAIHAAEIVASFLVIALSYIRIIIVILGMHSAEGHHKAFSTCAAHLAVFLLFFGSVAVMYLRFSATYSVFWDTAIAVTFVILAPFFNPIIYSLKNKDMKEAIGRLFHYQKRAGWAGK

SEQ ID NO: 412 - protein, 317 aa, Homo sapiens
MDQYNHSSLAEFVFLGFASVGYVRGWLFVLLLLAYLFTICGNMLIFSVIRLDAALHTPMYHFVSVLSFLELWYTATTIPKMLSNILSEKKTISFAGCLLQTYFFHSLGASECYLLTAMAYDRYLAICRPLHYPIIMTTTLCAKMAAACWTCGFLCPISEVILASQLPFCAYNEIQHIFCDFPPLLSLACKDTSANILVDFAINAFIILITFFFIMISYARIIGAVLKIKTASGRKKAFSTCASHLAVVLIFFGSIIFMYVRLKKSYSLTLDRTLAIVYSVLTPMVNPIIYSLRNKEIIKAIKRTIFQKGDKASLAHL

SEQ ID NO: 413 - protein, 312 aa, Homo sapiens
MALGNHSTITEFLLLGLSADPNIRALLFVLFLGIYLLTIMENLMLLLMIRADSCLHKPMYFFLSHLSFVDLCFSSVIVPKMLENLLSQRKTISVEGCLAQVFFVFVTAGTEACLLSGMAYDRHAAICRPLLYGQIMGKQLYMHLVWGSWGLGFLDALINVLLAVNMVFCEAKIIHHYSYEMPSLLPLSCSDISRSLIALLCSTLLHGLGNFLLVFLSYTRIISTILSISSTSGRSKAFSTCSAHLTAVTLYYGSGLLRHLMPNSGSPIELIFSVQYTVVTPMLNSLIYSLKNKEVKVALKRTLEKYLQYTRR

SEQ ID NO: 414 - protein, 310 aa, Homo sapiens
MMDNHSSATEFHLLGFPGSQGLHHILFAIFFFFYLVTLMGNTVIIVIVCVDKRLQSPMYFFLSHLSTLEILVTTIIVPMMLWGLLFLGCRQYLSLHVSLNFSCGTMEFALLGVMAVDRYVAVCNPLRYNIIMNSSTCIWVVIVSWVFGFLSEIWPIYATFQFTFRKSNSLDHFYCDRGQLLKLSCDNTLLTEFILFLMAVFILIGSLIPTIVSYTYIISTILKIPSASGRRKAFSTFASHFTCVVIGYGSCLFLYVKPKQTQGVEYNKIVSLLVSVLTPFLNPFIFTLRNDKVKEALRDGMKRCCQLLKD

SEQ ID NO: 415 - protein, 314 aa, Homo sapiens
MLMNYSSATEFYLLGFPGSEELHHILFAIFFFFYLVTLMGNTVIIMIVCVDKRLQSPMYFFLGHLSALEILVTTIIVPVMLWGLLLPGMQTIYLSACVVQLFLYLAVGTTEFALLGAMAVDRYVAVCNPLRYNIIMNRHTCNFVVLVSWVFGFLFQIWPVYVMFQLTYCKSNVVNNFFCDRGQLLKLSCNNTLFTEFILFLMAVFVLFGSLIPTIVSNAYIISTILKIPSSSGRRKSFSTCASHFTCVVIGYGSCLFLYVKPKQTQAADYNWVVSLMVSVVTPFLNPFIFTLRNDKVIEALRDGVKRCCQLFRN

SEQ ID NO: 416 - protein, 314 aa, Homo sapiens
MKRQNQSCVVEFILLGFSNFPELQVQLFGVFLVIYVVTLMGNAIITVIISLNQSLHVPMYLFLLNLSVVEVSFSAVITPEMLVVLSTEKTMISFVGCFAQMYFILLFGGTECFLLGAMAYDRFAAICHPLNYPVIMNRGVFMKLVIFSWISGIMVATVQTTWVFSFPFCGPNEINHLFCETPPVLELVCADTFLFEIYAFTGTILIVMVPFLLILLSYIRVLFAILKMPSTTGRQKAFSTCASHLTSVTLFYGTANMTYLQPKSGYSPETKKLISLAYTLLTPLLNPLIYSLRNSEMKRTLIKLWRRKVILHTF

SEQ ID NO: 417 - protein, 316 aa, Homo sapiens
MICENHTRVTEFILLGFTNNPEMQVSLFIFFLAIYTVTLLGNFLIVTVTSVDLALQTPMYFFLQNLSLLEVCFTLVMVPKMLVDLVSPRKIISFVGCGTQMYFFFFFGSSECFLLSMMAYDRFVAICNPLHYSVIMNRSLCLWMAIGSWMSGVPVSMLQTAWMMALPFCGPNAVDHFFCDGPPVLKLVTVDTTMYEMQALASTLLFIMFPFCLILVSYTRIIITILRMSSATGRQKAFSTCSSHLIVVSLFYGTASLTYLRPKSNQSPESKKLVSLSYTVITPMLNPIIYGLRNNEVKGAVKRTITQKVLQKLDVF

SEQ ID NO: 418 - protein, 332 aa, Homo sapiens
MLEGVEHLLLLLLLTDVNSKELQSGNQTSVSHFILVGLHHPPQLGAPLFLAFLVIYLLTVSGNGLIILTVLVDIRLHRPMCLFLCHLSFLDMTISCAIVPKMLAGFLLGSRIISFGGCVIQLFSFHFLGCTECFLYTLMAYDRFLAICKPLHYATIMTHRVCNSLALGTWLGGTIHSLFQTSFVFRLPFCGPNRVDYIFCDIPAMLRLACADTAINELVTFADIGFLALTCFMLILTSYGYIVAAILRIPSADGRRNAFSTCAAHLTVVIVYYVPCTFIYLRPCSQEPLDGVVAVFYTVITPLLNSIIYTLCNKEMKAALQRLGGHKEVQPH

SEQ ID NO: 419 - protein, 311 aa, Homo sapiens
MSKTSLVTAFILTGLPHAPGLDAPLFGIFLVVYVLTVLGNLLILLVIRVDSHLHTPMYYFLTNLSFIDMWFSTVTVPKMLMTLVSPSGRAISFHSCVAQLYFFHFLGSTECFLYTVMSYDRYLAISYPLRYTSMMSGSRCALLATSTWLSGSLHSAVQTILTFHLPYCGPNQIQHYLCDAPPILKLACADTSANEMVIFVDIGLVASGCFLLIVLSYVSIVCSILRIHTSEGRHRAFQTCASHCIVVLCFFVPCVFIYLRPGSRDVVDGVVAIFYTVLTPLLNPVVYTLRNKEVKKAVLKLRDKVAHSQGE

SEQ ID NO: 420 - protein, 318 aa, Homo sapiens
MQRANHSTVTQFILVGFSVFPHLQLMLFLLFLLMYLFTLLGNLLIMATVWSERSLHTPMYLFLCALSVSEILYTVAIIPRMLADLLSTQRSIAFLACASQMFFSFSFGFTHSFLLTVMGYDRYVAICHPLRYNVLMSPRGCACLVGCSWAGGLVMGMVVTSAIFHLAFCGHKEIHHFACHVPPLLKLACGDDVLVVAKGVGLVCITALLGCFLLILLSYAFIVAAILKIPSAEGRNKAFSTCASHLTVVVVHYGFASVIYLKPKSPQSLEGDTLMGITYTVLTPFLSPIIFSLRNKELKVAMKKTFFSKLYPEKNVMM

SEQ ID NO: 421 - protein, 315 aa, Homo sapiens
MLGLNHTSMSEFILVGFSAFPHLQLMLFLLFLLMYLFTLLGNLLIMATVWSERSLHTPMYLFLCVLSVSEILYTVAIIPRMLADLLSTQRSIAFLACASQMFFSFSFGFTHSFLLTVMGYDRYVAICHPLRYNVLMSPRGCACLVGCSWAGGSVMGMVVTSAIFQLTFCGSHEIQHFLCHVPPLLKLACGNNVPAVALGVGLVCIMALLGCFLLILLSYAFIVADILKIPSAEGRNKAFSTCASHLIVVIVHYGFASVIYLKPKGPHSQEGDTLMATTYAVLTPFLSPIIFSLRNKELKVAMKRTFLSTLYSSGT

SEQ ID NO: 422 - protein, 316 aa, Homo sapiens
MPGQNYRTISEFILSGFSAFPQQLLPVLFLLYLLMFLFTLLGNLLIMATVWIERRLHTPMYLFLCALSISEILFTVAITPRMLADLLFTHRSITFVACAIQMFFSFMFGFTHSFLLMVMGYDHYVTICHPLHYNMLMSPRGCAHLVAWTWAGGSVMGMMVTMMVFHLTFCGSNVIHHFLCHVLSLLKLACGSKTSSVIMGVMLVCVTALIGCLFLIILSFVFIVAAILRIPSAEGRHKTFSTCVSHLTVVVMHYSFASLIYLKPKGLHSMYSDALMATTYTVFTPFLSPIIFSLRNKELKNAINKNFCRRFCPLSS

SEQ ID NO: 423 - protein, 316 aa, Homo sapiens
MPSQNYSIISEFNLFGFSAFPQHLLPILFLLYLLMFLFTLLGNLLIMATIWIEHRLHTPMYLFLCTLSVSEILFTVAITPRMLADLLSTHHSITFVACANQMFFSFMFGFTHSFLLLVMGYDRYVAICHPLRYNVLMSPRDCAHLVACTWAGGSVMGMMVTTIVFHLTFCGSNVIHHFFCHVLSLLKLACENKTSSVIMGVMLVCVTALIGCLFLIILSYVFIVAAILRIPSAEGRHKTFSTCVSHLTVVVTHYSFASFIYLKPKGLHSMYSDALMATTYTVFTPFLSPIIFSLRNKELKNAINKNFYRKFCPPSS

SEQ ID NO: 424 - protein, 315 aa, Homo sapiens
MQGLNHTSVSEFILVGFSAFPHLQLMLFLLFLLMYLFTLLGNLLIMATVWSERSLHMPMYLFLCALSITEILYTVAIIPRMLADLLSTQRSIAFLACASQMFFSFSFGFTHSFLLTVMGYDRYVAICHPLRYNVLMSLRGCTCRVGCSWAGGLVMGMVVTSAIFHLAFCGHKEIHHFFCHVPPLLKLACGDDVLVVAKGVGLVCITALLGCFLLILLSYAFIVAAILKIPSAEGRNKAFSTCASHLTVVVVHYGFASVIYLKPKGPQSPEGDTLMGITYTVLTPFLSPIIFSLRNKELKVAMKKTCFTKLFPQNC

SEQ ID NO: 425 - protein, 313 aa, Homo sapiens
MAGENHTTLPEFLLLGFSDLKALQGPLFWVVLLVYLVTLLGNSLIILLTQVSPALHSPMYFFLRQLSVVELFYTTDIVPRTLANLGSPHPQAISFQGCAAQMYVFIVLGISECCLLTAMAYDRYVAICQPLRYSTLLSPRACMAMVGTSWLTGIITATTHASLIFSLPFRSHPIIPHFLCDILPVLRLASAGKHRSEISVMTATIVFIMIPFSLIVTSYIRILGAILAMASTQSRRKVFSTCSSHLLVVSLFFGTASITYIRPQAGSSVTTDRVLSLFYTVITPMLNPIIYTLRNKDVRRALRHLVKRQRPSP

SEQ ID NO: 426 - protein, 331 aa, Homo sapiens
MTSRSVCEKMTMTTENPNQTVVSHFFLEGLRYTAKHSSLFFLLFLLIYSITVAGNLLILLTVGSDSHLSLPMYHFLGHLSFLDACLSTVTVPKVMAGLLTLDGKVISFEGCAVQLYCFHFLASTECFLYTVMAYDRYLAICQPLHYPVAMNRRMCAEMAGITWAIGATHAAIHTSLTFRLLYCGPCHIAYFFCDIPPVLKLACTDTTINELVMLASIGIVAAGCLILIVISYIFIVAAVLRIRTAQGRQRAFSPCTAQLTGVLLYYVPPVCIYLQPRSSEAGAGAPAVFYTIVTPMLNPFIYTLRNKEVKHALQRLLCSSFRESTAGSPPP

SEQ ID NO: 427 - protein, 309 aa, Homo sapiens
MEGINKTAKMQFFFRPFSPDPEVQMLIFVVFLMMYLTSLGGNATIAVIVQINHSLHTPMYFFLANLAVLEIFYTSSITPLALANLLSMGKTPVSITGCGTQMFFFVFLGGADCVLLVVMAYDQFIAICHPLRYRLIMSWSLCVELLVGSLVLGFLLSLPLTILIFHLPFCHNDEIYHFYCDMPAVMRLACADTRVHKTALYIISFIVLSIPLSLISISYVFIVVAILRIRSAEGRQQAYSTCSSHILVVLLQYGCTSFIYLSPSSSYSPEMGRVVSVAYTFITPILNPLIYSLRNKELKDALRKALRKF

SEQ ID NO: 428 - protein, 305 aa, Homo sapiens
MEFVFLAYPSCPELHILSFLGVSLVYGLIITGNILIVVSIHTETCLCTSMYYFLGSLSGIEICYTAVVVPHILANTLQSEKTITLLGCATQMAFFIALGSADCFLLAAMAYDRYVAICHPLQYPLLMTLTLCVHLVVASVISGLFLSLQLVAFIFSLPFCQAQGIEHFFCDVPPVMHVVCAQSHIHEQSVLVAAILAIAVPFFLITTSYTFIVAALLKIHSAAGRHRAFSTCSSHLTVVLLQYGCCAFMYLCPSSSYNPKQDRFISLVYTLGTPLLNPLIYALRNSEMKGAVGRVLTRNCLSQNS

SEQ ID NO: 429 - protein, 317 aa, Homo sapiens
MLRNGSIVTEFILVGFQQSSTSTRALLFALFLALYSLTMAMNGLIIFITSWTDPKLNSPMYFFLGHLSLLDVCFITTTIPQMLIHLVVRDHIVSFVCCMTQMYFVFCVGVAECILLAFMAYDRYVAICYPLNYVPIISQKVCVRLVGTAWFFGLINGIFLEYISFREPFRRDNHIESFFCEAPIVIGLSCGDPQFSLWAIFADAIVVILSPMVLTVTSYVHILATILSKASSSGRGKTFSTCASHLTVVIFLYTSAMFSYMNPHSTHGPDKDKPFSLLYTIITPMCNPIIYSFRNKEIKEAMVRALGRTRLAQPQSV

SEQ ID NO: 430 - protein, 321 aa, Homo sapiens
MQIPKDGEQTKREKSNVTTIMEFVLLGFSDIPNLHWMLFSIFLLMYLMILMCNGIIILLIKIHPALQTPMYFFLSNFSLLEICYVTIIIPRMLMDIWTQKGNISLFACATQMCFFLMLGGTECLLLTVMAYDRYVAICKPLQYPLVMNHKVCIQLIIASWTITIPVVIGETCQIFLLPFCGTNTINHFFCDIPPILKLACGNIFVNEITVHVVAVVFITVPFLLIVVSYGKIISNILKLSSARGKAKAFSTCSSHLIVVILFFGAGTITYLQPKPHQFQRMGKLISLFYTILIPTLNPIIYTLRNKDIMVALRKLLAKLLT

SEQ ID NO: 431 - protein, 315 aa, Homo sapiens
MEIVSTGNETITEFVLLGFYDIPELHFLFFIVFTAVYVFIIIGNMLIIVAVVSSQRLHKPMYIFLANLSFLDILYTSAVMPKMLEGFLQEATISVAGCLLQFFIFGSLATAECLLLAVMAYDRYLAICYPLHYPLLMGPRRYMGLVVTTWLSGFVVDGLVVALVAQLRFCGPNHIDQFYCDFMLFVGLACSDPRVAQVTTLILSVFCLTIPFGLILTSYARIVVAVLRVPAGASRRRAFSTCSSHLAVVTTFYGTLMIFYVAPSAVHSQLLSKVFSLLYTVVTPLFNPVIYTMRNKEVHQALRKILCIKQTETLD

SEQ ID NO: 432 - protein, 315 aa, Homo sapiens
MNVSEPNSSFAFVNEFILQGFSCEWTIQIFLFSLFTTIYALTITGNGAIAFVLWCDRRLHTPMYMFLGNFSFLEIWYVSSTVPKMLVNFLSEKKNISFAGCFLQFYFFFSLGTSECLLLTVMAFDQYLAICRPLLYPNIMTGHLYAKLVILCWVCGFLWFLIPIVLISQKPFCGPNIIDHVVCDPGPLFALDCVSAPRIQLFCYTLSSLVIFGNFLFIIGSYTLVLKAVLGMPSSTGRHKAFSTCGSHLAVVSLCYSPLMVMYVSPGLGHSTGMQKIETLFYAMVTPLFNPLIYSLQNKEIKAALRKVLGSSNII

SEQ ID NO: 433 - protein, 307 aa, Homo sapiens
MLNTTSVTEFLLLGVTDIQELQPFLFVVFLTIYFISVTGNGAVLMIVISDPRLHSLMYFFLGNLSYLDICYSTVTLPKMLQNFLSTHKAISFLGCISQLHFFHSLGSTESMLFAVMAFDLSVAICKPLRYTVIMNPQLCTQMAITIWVIGFFHALLHSVMTSRLNFCGSNRIHHFLCDIKPLLKLACGNTELNQWLLSTVTGTIAMGPFFLTLLSYFYIITYLFFKTRSCSMLCKALSTCASHFMVVILFYAPVLFTYIHPALESFMDQDRIVAIMYTVVTPVLNPLIYTLRNKEVKGALGRVIRRL

SEQ ID NO: 434 - protein, 316 aa, Homo sapiens
MENVTTMNEFLLLGLTGVQELQPFFFGIFLIIYLINLIGNGSILVMVVLEPQLHSPMYFFLGNLSCLDISYSSVTLPKLLVNLVCSRRAISFLGCITQLHFFHFLGSTEAILLAIMAFDRFVAICNPLRYTVIMNPQVCILLAAAAWLISFFYALMHSVMTAHLSFCGSQKLNHFFYDVKPLLELACSDTLLNQWLLSIVTGSISMGAFFLTLLSCFYVIGFLLFKNRSCRILHKALSTCASHFMVVCLFYGPVGFTYIRPASATSMIQDRIMAIMYSAVTPVLNPLIYTLRNKEVMMALKKIFGRKLFKDWQQHH

SEQ ID NO: 435 - protein, 328 aa, Homo sapiens
MKLWMESHLIVPETRPSPRMMSNQTLVTEFILQGFSEHPEYRVFLFSCFLFLYSGALTGNVLITLAITFNPGLHAPMYFFLLNLATMDIICTSSIMPKALASLVSEESSISYGGCMAQLYFLTWAASSELLLLTVMAYDRYAAICHPLHYSSMMSKVFCSGLATAVWLLCAVNTAIHTGLMLRLDFCGPNVIIHFFCEVPPLLLLSCSSTYVNGVMIVLADAFYGIVNFLMTIASYGFIVSSILKVKTAWGRQKAFSTCSSHLTVVCMYYTAVFYAYISPVSGYSAGKSKLAGLLYTVLSPTLNPLIYTLRNKEVKAALRKLFPFFRN

SEQ ID NO: 436 - protein, 318 aa, Homo sapiens
MEWENHTILVEFFLKGLSGHPRLELLFFVLIFIMYVVILLGNGTLILISILDPHLHTPMYFFLGNLSFLDICYTTTSIPSTLVSFLSERKTISLSGCAVQMFLGLAMGTTECVLLGMMAFDRYVAICNPLRYPIIMSKDAYVPMAAGSWIIGAVNSAVQSVFVVQLPFCRNNIINHFTCEILAVMKLACADISDNEFIMLVATTLFILTPLLLIIVSYTLIIVSIFKISSSEGRSKASSTCSAHLTVVIIFYGTILFMYMKPKSKETLNSDDLDATDKIISMFYGVMTPMMNPLIYSLRNKDVKEAVKHLLNRRFFSK

SEQ ID NO: 437 - protein, 317 aa, Homo sapiens
MGEINQTLVSEFLLLGLSGYPKIEIVYFALILVMYLVILIGNGVLIIASIFDSHFHTPMYFFLGNLSFLDICYTSSSVPSTLVSLISKKRNISFSGCAVQMFFGFAMGSTECLLLGMMAFDRYVAICNPLRYPIILSKVAYVLMASVSWLSGGINSAVQTLLAMRLPFCGNNIINHFACEILAVLKLACADISLNIITMVISNMAFLVLPLMVIFFSYMFILYTILQMNSATGRRKAFSTCSAHLTVVIIFYGTIFFMYAKPKSQDLIGEEKLQALDKLISLFYGVVTPMLNPILYSLRNKDVKAAVKYLLNKKPIH

SEQ ID NO: 438 - protein, 318 aa, Homo sapiens
MDKINQTFVREFILLGLSGYPKLEIIFFALILVMYVVILIGNGVLIIASILDSRLHMPMYFFLGNLSFLDICYTTSSIPSTLVSLISKKRNISFSGCAVQMFFGFAMGSTECFLLGMMAFDRYVAICNPLRYPIIMNKVVYVLLTSVSWLSGGINSTVQTSLAMRWPFCGNNIINHFLCEILAVLKLACSDISVNIVTLAVSNIAFLVLPLLVIFFSYMFILYTILRTNSATGRHKAFSTCSAHLTVVIIFYGTIFFMYAKPKSQDLLGKDNLQATEGLVSMFYGVVTPMLNPIIYSLRNKDVKAAIKYLLSRKAINQ

SEQ ID NO: 439 - protein, 318 aa, Homo sapiens
MEWENQTILVEFFLKGHSVHPRLELLFFVLIFIMYVVILLGNGTLILISILDPHLHTPMYFFLGNLSFLDICYTTTSIPSTLVSFLSERKTISFSGCAVQMFLGLAMGTTECVLLGMMAFDRYVAICNPLRYPIIMSKNAYVPMAVGSWFAGIVNSAVQTTFVVQLPFCRKNVINHFSCEILAVMKLACADISGNEFLMLVATILFTLMPLLLIVISYSLIISSILKIHSSEGRSKAFSTCSAHLTVVIIFYGTILFMYMKPKSKETLNSDDLDATDKIISMFYGVMTPMMNPLIYSLRNKDVKEAVKHLPNRRFFSK

SEQ ID NO: 440 - protein, 319 aa, Homo sapiens
MFPANWTSVKVFFFLGFFHYPKVQVIIFAVCLLMYLITLLGNIFLISITILDSHLHTPMYLFLSNLSFLDIWYSSSALSPMLANFVSGRNTISFSGCATQMYLSLAMGSTECVLLPMMAYDRYVAICNPLRYPVIMNRRTCVQIAAGSWMTGCLTAMVEMMSVLPLSLCGNSIINHFTCEILAILKLVCVDTSLVQLIMLVISVLLLPMPMLLICISYAFILASILRISSVEGRSKAFSTCTAHLMVVVLFYGTALSMHLKPSAVDSQEIDKFMALVYAGQTPMLNPIIYSLRNKEVKVALKKLLIRNHFNTAFISILK

SEQ ID NO: 441 - protein, 313 aa, Homo sapiens
MSIINTSYVEITTFFLVGMPGLEYAHIWISIPICSMYLIAILGNGTILFIIKTEPSLHGPMYYFLSMLAMSDLGLSLSSLPTVLSIFLFNAPETSSSACFAQEFFIHGFSVLESSVLLIMSFDRFLAIHNPLRYTSILTTVRVAQIGIVFSFKSMLLVLPFPFTLRSLRYCKKNQLSHSYCLHQDVMKLACSDNRIDVIYGFFGALCLMVDFILIAVSYTLILKTVPGIASKKEELKALNTCVSHICAVIIFYLPIINLAVVHRFAGHVSPLINVLMANVLLLVPPLMKPIVYCVKTKQIRVRVVAKLCQWKI

SEQ ID NO: 442 - protein, 313 aa, Homo sapiens
MSIINTSYVEITTFFLVGMPGLEYAHIWISIPICSMYLIAILGNGTILFIIKTEPSLHEPMYYFLSMLAMSDLGLSLSSLPTVLSIFLFNAPEISSNACFAQEFFIHGFSVLESSVLLIMSFDRFLAIHNPLRYTSILTTVRVAQIGIVFSFKSMLLVLPFPFTLRNLRYCKKNQLSHSYCLHQDVMKLACSDNRIDVIYGFFGALCLMVDFILIAVSYTLILKTVLGIASKKEQLKALNTCVSHICAVIIFYLPIINLAVVHRFARHVSPLINVLMANVLLLVPPLTNPIVYCVKTKQIRVRVVAKLCQRKI

SEQ ID NO: 443 - protein, 312 aa, Homo sapiens
MSVLNNSEVKLFLLIGIPGLEHAHIWFSIPICLMYLLAIMGNCTILFIIKTEPSLHEPMYYFLAMLAVSDMGLSLSSLPTMLRVFLFNAMGISPNACFAQEFFIHGFTVMESSVLLIMSLDRFLAIHNPLRYSSILTSNRVAKMGLILAIRSILLVIPFPFTLRRLKYCQKNLLSHSYCLHQDTMKLACSDNKTNVIYGFFIALCTMLDLALIVLSYVLILKTILSIASLAERLKALNTCVSHICAVLTFYVPIITLAAMHHFAKHKSPLVVILIADMFLLVPPLMNPIVYCVKTRQIWEKILGKLLNVCGR

SEQ ID NO: 444 - protein, 312 aa, Homo sapiens
MWPNITAAPFLLTGFPGLEAAHHWISIPFFAVYVCILLGNGMLLYLIKHDHSLHEPMYYFLTMLAGTDLMVTLTTMPTVMGILWVNHREISSVGCFLQAYFIHSLSVVESGSLLAMAYDCFIAIRNPLRYASILTNTRVIALGVGVFLRGFVSILPVILRLFSFSYCKSHVITRAFCLHQEIMRLACADITFNRLYPVILISLTIFLDCLIILFSYILILNTVIGIASGEERAKALNTCISHISCVLIFYVTVMGLTFIYRFGKNVPEVVHIIMSYIYFLFPPLMNPVIYSIKTKQIQYGIIRLLSKHRFSS

SEQ ID NO: 445 - protein, 310 aa, Homo sapiens
MWYNNSAGPFLLTGFLGSEAVHYRISMSFFVIYFSVLFGNGTLLVLIWNDHSLHEPMYYFLAMLADTDLGMTFTTMPTVLGVLLLDQREIAHAACFTQSFIHSLAIVESGILLVLAYDCFIAIRTPLRYNCILTNSRVMNIGLGVLMRGFMSILPIILSLYCYPYCGSRALLHTFCLHQDVIKLACADITFNHIYPIIQTSLTVFLDALIIIFSYILILKTVMGIASGQEEAKSLNTCVSHISCVLVFHITVMGLSFIHRFGKHAPHVVPITMSYVHFLFPPFVNPIIYSIKTKQIQRSIIRLFSGQSRA

SEQ ID NO: 446 - protein, 312 aa, Homo sapiens
MSSSGSSHPFLLTGFPGLEEAHHWISVFFLFMYISILFGNGTLLLLIKEDHNLHEPMYFFLAMLAATDLGLALTTMPTVLGVLWLDHREIGSAACFSQAYFIHSLSFLESGILLAMAYDRFIAICNPLRYTSVLTNTRVVKIGLGVLMRGFVSVVPPIRPLYFFLYCHSHVLSHAFCLHQDVIKLACADTTFNRLYPAVLVVFIFVLDYLIIFISYVLILKTVLSIASREERAKALITCVSHICCVLVFYVTVIGLSLIHRFGKQVPHIVHLIMSYAYFLFPPLMNPITYSVKTKQIQNAILHLFTTHRIGT

SEQ ID NO: 447 - protein, 312 aa, Homo sapiens
MGLNKSASTFQLTGFPGMEKAHHWIFIPLLAAYISILLGNGTLLFLIRNDHNLHEPMYYFLAMLAATDLGVTLTTMPTVLGVLWLDHREIGHGACFSQAYFIHTLSVMESGVLLAMAYDCFITIRSPLRYTSILTNTQVMKIGVRVLTRAGLSIMPIVVRLHWFPYCRSHVLSHAFCLHQDVIKLACADITFNRLYPVVVLFAMVLLDFLIIFFSYILILKTVMGIGSGGERAKALNTCVSHICCILVFYVTVVCLTFIHRFGKHVPHVVHITMSYIHFLFPPFMNPFIYSIKTKQIQSGILRLFSLPHSRA

SEQ ID NO: 448 - protein, 324 aa, Homo sapiens
MQKPQLLVPIIATSNGNLVHAAYFLLVGIPGLGPTIHFWLAFPLCFMYALATLGNLTIVLIIRVERRLHEPMYLFLAMLSTIDLVLSSITMPKMASLFLMGIQEIEFNICLAQMFLIHALSAVESAVLLAMAFDRFVAICHPLRHASVLTGCTVAKIGLSALTRGFVFFFPLPFILKWLSYCQTHTVTHSFCLHQDIMKLSCTDTRVNVVYGLFIILSVMGVDSLFIGFSYILILWAVLELSSRRAALKAFNTCISHLCAVLVFYVPLIGLSVVHRLGGPTSLLHVVMANTYLLLPPVVNPLVYGAKTKEICSRVLCMFSQGGK

SEQ ID NO: 449 - protein, 320 aa, Homo sapiens
MSSCNFTHATFVLIGIPGLEKAHFWVGFPLLSMYVVAMFGNCIVVFIVRTERSLHAPMYLFLCMLAAIDLALSTSTMPKILALFWFDSREISFEACLTQMFFIHALSAIESTILLAMAFDRYVAICHPLRHAAVLNNTVTAQIGIVAVVRGSLFFFPLPLLIKRLAFCHSNVLSHSYCVHQDVMKLAYADTLPNVVYGLTAILLVMGVDVMFISLSYFLIIRTVLQLPSKSERAKAFGTCVSHIGVVLAFYVPLIGLSVVHRFGNSLHPIVRVVMGDIYLLLPPVINPIIYGAKTKQIRTRVLAMFKISCDKDLQAVGGK

SEQ ID NO: 450 - protein, 319 aa, Homo sapiens
MLQNQDTMEILSNSTSKFPTFLLTGIPGLESAHVWISIPFCCFYAIALSGNSVILFVIITQQSLHEPMYYFLFRLSATDLGLTVSSLSTTLGILWFEAREISLYSCIVQMFFLHGFTFMESGVLVATAFDRYVAICDPLRYTTILTNSRIIQMGLLMITRAIVLILPLLLLLKPLYFCRMNALSHSYCYHPDVIQLACSDIRANSICGLIDLILTTGIDTPCIVLSYILIIHSVLRIASPEEWHKVFSTCVSHVGAVAFFYIHMLSLSLVYRYGRSAPRVVHSVMANVYLLLPPVLNPIIDSVKTKQIRKAMLSLLLTK

SEQ ID NO: 451 - protein, 330 aa, Homo sapiens
MSVLNNTIAEPLIFLLMGIPGLKATQYWISIPFCLLYVVAVSGNSMILFVVLCERSLHKPMYYFLSMLSATDLSLSLCTLSTTLGVFWFEAREINLNACIAQMFFLHGFTFMESGVLLAMAFDRFVAICYPLRYTTILTNARIAKIGMSMLIRNVAVMLPVMLFVKRLSFCSSMVLSHSYCYHVDLIQLSCTDNRINSILGLFALLSTTGFDCPCILLSYILIIRSVLSIASSEERRKAFNTCTSHISAVSIFYLPLISLSLVHRYGHSAPPFVHIIMANVFLLIPPVLNPIIYSVKIKQIQKAIIKVLIQKHSKSNHQLFLIRDKAIYE

SEQ ID NO: 452 - protein, 321 aa, Homo sapiens
MTILLNSSLQRATFFLTGFQGLEGLHGWISIPFCFIYLTVILGNLTILHVICTDATLHGPMYYFLGMLAVTDLGLCLSTLPTVLGIFWFDTREIGIPACFTQLFFIHTLSSMESSVLLSMSIDRYVAVCNPLHDSTVLTPACIVKMGLSSVLRSALLILPLPFLLKRFQYCHSHVLAHAYCLHLEIMKLACSSIIVNHIYGLFVVACTVGVDSLLIFLSYALILRTVLSIASHQERLRALNTCVSHICAVLLFYIPMIGLSLVHRFGEHLPRVVHLFMSYVYLLVPPLMNPIIYSIKTKQIRQRIIKKFQFIKSLRCFWKD

SEQ ID NO: 453 - protein, 314 aa, Homo sapiens
MTLGSLGNSSSSVSATFLLSGIPGLERMHIWISIPLCFMYLVSIPGNCTILFIIKTERSLHEPMYLFLSMLALIDLGLSLCTLPTVLGIFWVGAREISHDACFAQLFFIHCFSFLESSVLLSMAFDRFVAICHPLHYVSILTNTVIGRIGLVSLGRSVALIFPLPFMLKRFPYCGSPVLSHSYCLHQEVMKLACADMKANSIYGMFVIVSTVGIDSLLILFSYALILRTVLSIASRAERFKALNTCVSHICAVLLFYTPMIGLSVIHRFGKQAPHLVQVVMGFMYLLFPPVMNPIVYSVKTKQIRDRVTHAFCY

SEQ ID NO: 454 - protein, 314 aa, Homo sapiens
MLGLNGTPFQPATLQLTGIPGIQTGLTWVALIFCILYMISIVGNLSILTLVFWEPALHQPMYYFLSMLALNDLGVSFSTLPTVISTFCFNYNHVAFNACLVQMFFIHTFSFMESGILLAMSLDRFVAICYPLRYVTVLTHNRILAMGLGILTKSFTTLFPFPFVVKRLPFCKGNVLHHSYCLHPDLMKVACGDIHVNNIYGLLVIIFTYGMDSTFILLSYALILRAMLVIISQEQRLKALNTCMSHICAVLAFYVPIIAVSMIHRFWKSAPPVVHVMMSNVYLFVPPMLNPIIYSVKTKEIRKGILKFFHKSQA

SEQ ID NO: 455 - protein, 312 aa, Homo sapiens
MGLFNVTHPAFFLLTGIPGLESSHSWLSGPLCVMYAVALGGNTVILQAVRVEPSLHEPMYYFLSMLSFSDVAISMATLPTVLRTFCLNARNITFDACLIQMFLIHFFSMMESGILLAMSFDRYVAICDPLRYATVLTTEVIAAMGLGAAARSFITLFPLPFLIKRLPICRSNVLSHSYCLHPDMMRLACADISINSIYGLFVLVSTFGMDLFFIFLSYVLILRSVMATASREERLKALNTCVSHILAVLAFYVPMIGVSTVHRFGKHVPCYIHVLMSNVYLFVPPVLNPLIYSAKTKEIRRAIFRMFHHIKI

SEQ ID NO: 456 - protein, 316 aa, Homo sapiens
MKISNNSLGFLPTTFILVGIPGLESEHLWISVPFSLIYIIIFLGNGIILHVIRTDIALHQPMYLFLAMLALAEVRVSASTLPTVLGIFLFGNTEISLEACLFPDVLHPFFIHDGASCAAGHVFGPLYSHLQPTELHSYPDTAQGLWHRSYYRTEKHYAHGSVAHSLMASALLWPQCPLTFLLSAPQSYLSCGNISVNNIYGIFIVTSTFGLDSLLIVISYGLILHTVLGIATGEGRKKALNTCGSHVCAVLAYYVPMIGLSIVHRLGHRVSPLLQAMMANAYLFFPPVVNPIVYSIKTKEIHGAIVRMLLEKRRRV

SEQ ID NO: 457 - protein, 315 aa, Homo sapiens
MGDWNNSDAVEPIFILRGFPGLEYVHSWLSILFCLAYLVAFMGNVTILSVIWIESSLHQPMYYFISILAVNDLGMSLSTLPTMLAVLWLDAPEIQASACYAQLFFIHTFTFLESSVLLAMAFDRFVAICHPLHYPTILTNSVIGKIGLACLLRSLGVVLPTPLLLRHYHYCHGNALSHAFCLHQDVLRLSCTDARTNSIYGLCVVIATLGVDSIFILLSYVLILNTVLDIASREEQLKALNTCVSHICVVLIFFVPVIGVSMVHRFGKHLSPIVHILMADIYLLLPPVLNPIVYSVRTKQIRLGILHKFVLRRRF

SEQ ID NO: 458 - protein, 326 aa, Homo sapiens
MSVQYSLSPQFMLLSNITQFSPIFYLTSFPGLEGIKHWIFIPFFFMYMVAISGNCFILIIIKTNPRLHTPMYYLLSLLALTDLGLCVSTLPTTMGIFWFNSHSIYFGACQIQMFCIHSFSFMESSVLLMMSFDRLVAICHPLRYSVIITGQQVVRAGLIVIFRGPVATIPIVLLLKAFPYCGSVVLSHSFCLHQEVIQLACTDITFNNLYGLMVVVFTVMLDLVLIALSYGLILHTVAGLASQEEQRRAFQTCTAPLCAVLVFFVPMMGLSLVHRFGKHAPPAIHLLMANVYLFVPPMLNPIIYSIKTKEIHRAIIKFLGLKKASK

SEQ ID NO: 459 - protein, 317 aa, Homo sapiens
MSQVTNTTQEGIYFILTDIPGFEASHIWISIPVCCLYTISIMGNTTILTVIRTEPSVHQRMYLFLSMLALTDLGLTLTTLPTVMQLLWFNVRRISSEACFAQFFFLHGFSFMESSVLLAMSVDCYVAICCPLHYASILTNEVIGRTGLAIICCCVLAVLPSLFLLKRLPFCHSHLLSRSYCLHQDMIRLVCADIRLNSWYGFALALLIIIVDPLLIVISYTLILKNILGTATWAERLRALNNCLSHILAVLVLYIPMVGVSMTHRFAKHASPLVHVIMANIYLLAPPVMNPIIYSVKNKQIQWGMLNFLSLKNMHSR

SEQ ID NO: 460 - protein, 323 aa, Homo sapiens
MSTLPTQIAPNSSTSMAPTFLLVGMPGLSGAPSWWTLPLIAVYLLSALGNGTILWIIALQPALHRPMHFFLFLLSVSDIGLVTALMPTLLGIALAGAHTVPASACLLQMVFIHVFSVMESSVLLAMSIDRALAICRPLHYPALLTNGVISKISLAISFRCLGLHLPLPFLLAYMPYCLPQVLTHSYCLHPDVARLACPEAWGAAYSLFVVLSAMGLDPLLIFFSYGLIGKVLQGVESREDRWKAGQTCAAHLSAVLLFYIPMILLALINHPELPITQHTHTLLSYVHFLLPPLINPILYSVKMKEIRKRILNRLQPRKVGGAQ

SEQ ID NO: 461 - protein, 327 aa, Homo sapiens
MAIFNNTTSSSSNFLLTAFPGLECAHVWISIPVCCLYTIALLGNSMIFLVIITKRRLHKPMYYFLSMLAAVDLCLTITTLPTVLGVLWFHAREISFKACFIQMFFVHAFSLLESSVLVAMAFDRFVAICNPLNYATILTDRMVLVIGLVICIRPAVFLLPLLVAINTVSFHGGHELSHPFCYHPEVIKYTYSKPWISSFWGLFLQLYLNGTDVLFILFSYVLILRTVLGIVARKKQQKALSTCVCHICAVTIFYVPLISLSLAHRLFHSTPRVLCSTLANIYLLLPPVLNPIIYSLKTKTIRQAMFQLLQSKGSWGFNVRGLRGRWD

SEQ ID NO: 462 - protein, 315 aa, Homo sapiens
MITSVSPSTSTNSSFLLTGFSGMEQQYPWLSIPFSSIYAMVLLGNCMVLHVIWTEPSLHQPMFYFLSMLALTDLCMGLSTVYTVLGILWGIIREISLDSCIAQSYFIHGLSFMESSVLLTMAFDRYIAICNPLRYSSILTNSRIIKIGLTIIGRSFFFITPPIICLKFFNYCHFHILSHSFCLHQDLLRLACSDIRFNSYYALMLVICILLLDAILILFSYILILKSVLAVASQEERHKLFQTCISHICAVLVFYIPIISLTMVHRFGKHLSPVAHVLIGNIYILFPPLMNPIIYSVKTQQIHTRMLRLFSLKRY

SEQ ID NO: 463 - protein, 312 aa, Homo sapiens
MSISNITVYMPSVLTLVGIPGLESVQCWIGIPFCAIYLIAMIGNSLLLSIIKSERSLHEPLYIFLGMLGATDIALASSIMPKMLGIFWFNVPEIYFDSCLLQMWFIHTLQGIESGILVAMALDRYVAICYPLRHANIFTHQLVIQIGTMVVLRAAILVAPCLVLIKCRFQFYHTTVISHSYCEHMAIVKLAAANVQVNKIYGLFVAFTVAGFDLTFITLSYIQIFITVFRLPQKEARFKAFNTCIAHICVFLQFYLLAFFSFFTHRFGSHISPYIHILFSSIYLLVPPFLNPLVYGAKTTQIRIHVVKMFCS

SEQ ID NO: 464 - protein, 316 aa, Homo sapiens
MPTFNGSVFMPSAFILIGIPGLESVQCWIGIPFSAMYLIGVIGNSLILVIIKYENSLHIPMYIFLAMLAATDIALNTCILPKMLGIFWFHLPEISFDACLFQMWLIHSFQAIESGILLAMALDRYVAICIPLRHATIFSQQFLTHIGLGVTLRAAILIIPSLGLIKCCLKHYRTTVISHSYCEHMAIVKLATEDIRVNKIYGLFVAFAILGFDIIFITLSYVQIFITVFQLPQKEARFKAFNTCIAHICVFLQFYLLAFFSFFTHRFGSHIPPYIHILLSNLYLLVPPFLNPIVYGVKTKQIRDHIVKVFFFKKVT

SEQ ID NO: 465 - protein, 323 aa, Homo sapiens
MSHTNVTIFHPAVFVLPGIPGLEAYHIWLSIPLCLIYITAVLGNSILIVVIVMERNLHVPMYFFLSMLAVMDILLSTTTVPKALAIFWLQAHNIAFDACVTQGFFVHMMFVGESAILLAMAFDRFVAICAPLRYTTVLTWPVVGRIALAVITRSFCIIFPVIFLLKRLPFCLTNIVPHSYCEHIGVARLACADITVNIWYGFSVPIVMVILDVILIAVSYSLILRAVFRLPSQDARHKALSTCGSHLCVILMFYVPSFFTLLTHHFGRNIPQHVHILLANLYVAVPPMLNPIVYGVKTKQIREGVAHRFFDIKTWCCTSPLGS

SEQ ID NO: 466 - protein, 314 aa, Homo sapiens
MPTVNHSGTSHTVFHLLGIPGLQDQHMWISIPFFISYVTALLGNSLLIFIILTKRSLHEPMYLFLCMLAGADIVLSTCTIPQALAIFWFRAGDISLDRCITQLFFIHSTFISESGILLVMAFDHYIAICYPLRYTTILTNALIKKICVTVSLRSYGTIFPIIFLLKRLTFCQNNIIPHTFCEHIGLAKYACNDIRINIWYGFSILMSTVVLDVVLIFISYMLILHAVFHMPSPDACHKALNTFGSHVCIIILFYGSGIFTILTQRFGRHIPPCIHIPLANVCILAPPMLNPIIYGIKTKQIQEQVVQFLFIKQK

SEQ ID NO: 467 - protein, 335 aa, Homo sapiens
MAQVRALHKIMALFSANSIGAMNNSDTRIAGCFLTGIPGLEQLHIWLSIPFCIMYITALEGNGILICVILSQAILHEPMYIFLSMLASADVLLSTTTMPKALANLWLGYSLISFDGCLTQMFFIHFLFIHSAVLLAMAFDRYVAICSPLRYVTILTSKVIGKIVTAALSHSFIIMFPSIFLLEHLHYCQINIIAHTFCEHMGIAHLSCSDISINVWYGLAAALLSTGLDIMLITVSYIHILQAVFRLLSQDARSKALSTCGSHICVILLFYVPALFSVFAYRFGGRSVPCYVHILLASLYVVIPPMLNPVIYGVRTKPILEGAKQMFSNLAKGSK

SEQ ID NO: 468 - protein, 318 aa, Homo sapiens
MSDSNLSDNHLPDTFFLTGIPGLEAAHFWIAIPFCAMYLVALVGNAALILVIAMDNALHAPMYLFLCLLSLTDLALSSTTVPKMLAILWLHAGEISFGGCLAQMFCVHSIYALESSILLAMAFDRYVAICNPLRYTTILNHAVIGRIGFVGLFRSVAIVSPFIFLLRRLPYCGHRVMTHTYCEHMGIARLACANITVNIVYGLTVALLAMGLDSILIAISYGFILHAVFHLPSHDAQHKALSTCGSHIGIILVFYIPAFFSFLTHRFGHHEVPKHVHIFLANLYVLVPPVLNPILYGARTKEIRSRLLKLLHLGKTSI

SEQ ID NO: 469 - protein, 327 aa, Homo sapiens
MLHTNNTQFHPSTFLVVGVPGLEDVHVWIGFPFFAVYLTALLGNIIILFVIQTEQSLHQPMFYFLAMLAGTDLGLSTATIPKMLGIFWFNLGEIAFGACITQMYTIHICTGLESVVLTVTGIDRYIAICNPLRYSMILTNKVIAILGIVIIVRTLVFVTPFTFLILRLPFCGVRIIPHTYCEHMGLAKLACASINVIYGLIAFSVGYIDISVIGFSYVQILRAVFHLPAWDARPKALSTCGSHVCVMLAFYLPALFSFMTHRFGHNIPHYIHILLANLYVVFPPALNSVIYGVKTKQIREQVLRILNPKSFWHFDPKRIFHNNSVRQ

SEQ ID NO: 470 - protein, 313 aa, Homo sapiens
MPIANDTQFHTSSFLLLGIPGLEDVHIWIGFPFFSVYLIALLGNAAIFFVIQTEQSLHEPMYYCLAMLDSIDLSLSTATIPKMLGIFWFNIKEISFGGYLSQMFFIHFFTVMESIVLVAMAFDRYIAICKPLWYTMILTSKIISLIAGIAVLRSLYMVIPLVFLLLRLPFCGHRIIPHTYCEHMGIARLACASIKVNIMFGLGSISLLLLDVLLIILSHIRILYAVFCLPSWEARLKALNTCGSHIGVILAFSTPAFFSFFTHCFGHDIPQYIHIFLANLYVVVPPTLNPVIYGVRTKHIRETVLRIFFKTDH

SEQ ID NO: 471 - protein, 314 aa, Homo sapiens
MIIFNLSSYNPGPFILVGIPGLEQFHVWIGIPFCIIYIVAVVGNCILLYLIVVEHSLHEPMFFFLSMLAMTDLILSTAGVPKALSIFWLGAREITFPGCLTQMFFLHYNFVLDSAILMAMAFDHYVAICSPLRYTTILTPKTIIKSAMGISFRSFCIILPDVFLLTCLPFCRTRIIPHTYCEHIGVAQLACADISINFWYGFCVPIMTVISDVILIAVSYAHILCAVFGLPSQDACQKALGTCGSHVCVILMFYTPAFFSILAHRFGHNVSRTFHIMFANLYIVIPPALNPMVYGVKTKQIRDKVILLFSKGTG

SEQ ID NO: 472 - protein, 324 aa, Homo sapiens
MLGPAYNHTMETPASFLLVGIPGLQSSHLWLAISLSAMYITALLGNTLIVTAIWMDSTRHEPMYCFLCVLAAVDIVMASSVVPKMVSIFCSGDSSISFSACFTQMFFVHLATAVETGLLLTMAFDRYVAICKPLHYKRILTPQVMLGMSMAVTIRAVTFMTPLSWMMNHLPFCGSNVVVHSYCKHIALARLACADPVPSSLYSLIGSSLMVGSDVAFIAASYILILRAVFDLSSKTAQLKALSTCGSHVGVMALYYLPGMASIYAAWLGQDIVPLHTQVLLADLYVIIPATLNPIIYGMRTKQLLEGIWSYLMHFLFDHSNLGS

SEQ ID NO: 473 - protein, 350 aa, Homo sapiens
MCQQILRDCILLIHHLCINRKKVSLVMLGPAYNHTMETPASFLLVGIPGLQSSHLWLAISLSAMYIIALLGNTIIVTAIWMDSTRHEPMYCFLCVLAAVDIVMASSVVPKMVSIFCSGDSSISFSACFTQMFFVHLATAVETGLLLTMAFDRYVAICKPLHYKRILTPQVMLGMSMAITIRAIIAITPLSWMVSHLPFCGSNVVVHSYCEHIALARLACADPVPSSLYSLIGSSLMVGSDVAFIAASYILILKAVFGLSSKTAQLKALSTCGSHVGVMALYYLPGMASIYAAWLGQDVVPLHTQVLLADLYVIIPATLNPIIYGMRTKQLRERIWSYLMHVLFDHSNLGS

SEQ ID NO: 474 - protein, 311 aa, Homo sapiens
MFYHNKSIFHPVTFFLIGIPGLEDFHMWISGPFCSVYLVALLGNATILLVIKVEQTLREPMFYFLAILSTIDLALSTTSVPRMLGIFWFDAHEINYGACVAQMFLIHAFTGMEAEVLLAMAFDRYVAVCAPLHYATILTSQVLVGISMCIVIRPVLLTLPMVYLIYRLPFCQAHIIAHSYCEHMGIAKLSCGNIRINGIYGLFVVSFFVLNLVLIGISYVYILRAVFRLPSHDAQLKALSTCGAHVGVICVFYIPSVFSFLTHRFGHQIPGYIHILVANLYLIIPPSLNPIIYGVRTKQIRERVLYVFTKK

SEQ ID NO: 475 - protein, 314 aa, Homo sapiens
MLPSNITSTHPAVFLLVGIPGLEHLHAWISIPFCFAYTLALLGNCTLLFIIQADAALHEPMYLFLAMLATIDLVLSSTTLPKMLAIFWFRDQEINFFACLVQMFFLHSFSIMESAVLLAMAFDRYVAICKPLHYTTVLTGSLITKIGMAAVARAVTLMTPLPFLLRRFHYCRGPVIAHCYCEHMAVVRLACGDTSFNNIYGIAVAMFIVVLDLLFVILSYVFILQAVLQLASQEARYKAFGTCVSHIGAILSTYTPVVISSVMHRVARHAAPRVHILLAIFYLLFPPMVNPIIYGVKTKQIREYVLSLFQRKNM

SEQ ID NO: 476 - protein, 314 aa, Homo sapiens
MSASNITLTHPTAFLLVGIPGLEHLHIWISIPFCLAYTLALLGNCTLLLIIQADAALHEPMYLFLAMLAAIDLVLSSSALPKMLAIFWFRDREINFFACLAQMFFLHSFSIMESAVLLAMAFDRYVAICKPLHYTKVLTGSLITKIGMAAVARAVTLMTPLPFLLRCFHYCRGPVIAHCYCEHMAVVRLACGDTSFNNIYGIAVAMFIVVLDLLLVILSYIFILQAVLLLASQEARYKAFGTCVSHIGAILAFYTTVVISSVMHRVARHAAPHVHILLANFYLLFPPMVNPIIYGVKTKQIRESILGVFPRKDM

SEQ ID NO: 477 - protein, 320 aa, Homo sapiens
MSFLNGTSLTPASFILNGIPGLEDVHLWISFPLCTMYSIAITGNFGLMYLIYCDEALHRPMYVFLALLSFTDVLMCTSTLPNTLFILWFNLKEIDFKACLAQMFFVHTFTGMESGVLMLMALDHCVAICFPLRYATILTNSVIAKAGFLTFLRGVMLVIPSTFLTKRLPYCKGNVIPHTYCDHMSVAKISCGNVRVNAIYGLIVALLIGGFDILCITISYTMILQAVVSLSSADARQKAFSTCTAHFCAIVLTYVPAFFTFFTHHFGGHTIPLHIHIIMANLYLLMPPTMNPIVYGVKTRQVRESVIRFFLKGKDNSHNF

SEQ ID NO: 478 - protein, 315 aa, Homo sapiens
MVLASGNSSSHPVSFILLGIPGLESFQLWIAFPFCATYAVAVVGNITLLHVIRIDHTLHEPMYLFLAMLAITDLVLSSSTQPKMLAIFWFHAHEIQYHACLIQVFFIHAFSSVESGVLMAMALDCYVAICFPLRHSSILTPSVVIKLGTIVMLRGLLWVSPFCFMVSRMPFCQHQAIPQSYCEHMAVLKLVCADTSISRGNGLFVAFSVAGFDMIVIGMSYVMILRAVLQLPSGEARLKAFSTRSSHICVILALYIPALFSFLTYRFGHDVPRVVHILFANLYLLIPPMLNPIIYGVRTKQIGDRVIQGCCGNIP

SEQ ID NO: 479 - protein, 320 aa, Homo sapiens
MAETLQLNSTFLHPNFFILTGFPGLGSAQTWLTLVFGPIYLLALLGNGALPAVVWIDSTLHQPMFLLLAILAATDLGLATSIAPGLLAVLWLGPRSVPYAVCLVQMFFVHALTAMESGVLLAMACDRAAAIGRPLHYPVLVTKACVGYAALALALKAVAIVVPFPLLVAKFEHFQAKTIGHTYCAHMAVVELVVGNTQATNLYGLALSLAISGMDILGITGSYGLIAHAVLQLPTREAHAKAFGTCSSHICVILAFYIPGLFSYLTHRFGHHTVPKPVHILLSNIYLLLPPALNPLIYGARTKQIRDRLLETFTFRKSPL

SEQ ID NO: 480 - protein, 313 aa, Homo sapiens
MTLPSNNSTSPVFEFFLICFPSFQSWQHWLSLPLSLLFLLAMGANATLLITIYLEASLHQPLYYLLSLLSLLDIVLCLTVIPKVLAIFWFDLRSISFPACFLQVFIMNSFLTMESCTFMIMAYDRYVAICKPLQYSSIITDQFVARAAIFVVARNGLLTMPIPILSSRLRYCAGHIIKNCICTNVSVSKLSCDDITLNQSYQFVIGWTLLGSDLILIVLSYFFILKTVLRIKGEGDMAKALGTCGSHFILILFFTTVLLVLVITNLARKRIPPDVPILLNILHHLIPPALNPIVYGVRTKEIKQGIQNLLRRL

SEQ ID NO: 481 - protein, 319 aa, Homo sapiens
MDTSTSVTYDSSLQISQFILMGLPGIHEWQHWLSLPLTLLYLLALGANLLIIITIQHETVLHEPMYHLLGILAVVDIGLATTIMPKILAIFWFDAKAISLPMCFAQIYAIHCFFCIESGIFLCMAVDRYIAICRPLQYPSIVTKAFVFKATGFIMLRNGLLTIPVPILAAQRHYCSRNEIEHCLCSNLGVISLACDDITVNKFYQLMLAWVLVGSDMALVFSSYAVILHSVLRLNSAEAMSKALSTCSSHLILILFHTGIIVLSVTHLAEKKIPLIPVFLNVLHNVIPPALNPLACALRMHKLRLGFQRLLGLGQDVSK

SEQ ID NO: 482 - protein, 311 aa, Homo sapiens
MTGGGNITEITYFILLGFSDFPRIIKVLFTIFLVIYITSLAWNLSLIVLIRMDSHLHTPMYFFLSNLSFIDVCYISSTVPKMLSNLLQEQQTITFVGCIIQYFIFSTMGLSESCLMTAMAYDRYAAICNPLLYSSIMSPTLCVWMVLGAYMTGLTASLFQIGALLQLHFCGSNVIRHFFCDMPQLLILSCTDTFFVQVMTAILTMFFGIASALVIMISYGYIGISIMKITSAKGRSKAFNTCASHLTAVSLFYTSGIFVYLSSSSGGSSSFDRFASVFYTVVIPMLNPLIYSLRNKEIKDALKRLQKRKCC

SEQ ID NO: 483 - protein, 309 aa, Mus musculus
MTAENQSTVTEFILGGLTNRPELQLPLFLLFLGIYVVTMVGNLGMITLIGLNSQLHTPMYFFLSNLSLVDLCYSSVITPKMLINFVSQRNLISYVGCMSQLYFFLVFVIAECYMLTVMAYDRYVAICQPLLYNIIMSPALCSLLVAFVYAVGLIGSAIETGLMLKLNYCEDLISHYFCDILPLMKLSCSSTYDVEMAVFFLAGFDIIVTSLTVLISYAFILSSILRISSNEGRSKAFSTCSSHFAAVGLFYGSTAFMYLKPSTASSLAQENVASVFYTTVIPMFNPLIYSLRNKEVKTALDKTLRRKVF

SEQ ID NO: 484 - protein, 313 aa, Homo sapiens
MGDRGTSNHSEMTDFILAGFRVRPELHILLFLLFLFVYAMILLGNVGMMTIIMTDPRLNTPMYFFLGNLSFIDLFYSSVIEPKAMINFWSENKSISFAGCVAQLFLFALLIVTEGFLLAAMAYDRFIAICNPLLYSVQMSTRLCTQLVAGSYFCGCISSVIQTSMTFTLSFCASRAVDHFYCDSRPLQRLSCSDLFIHRMISFSLSCIIILPTIIVIIVSYMYIVSTVLKIHSTEGHKKAFSTCSSHLGVVSVLYGAVFFMYLTPDRFPELSKVASLCYSLVTPMLNPLIYSLRNKDVQEALKKFLEKKNIIL

SEQ ID NO: 485 - protein, 317 aa, Artificial Sequence
  OR1B1 consensus-c
MSCAPNASHSPVFLLLGFSRANISYTLLFFLFLAIYLTTILGNVTLVLLISWDSRLHSPMYYLLRGLSVIDMGLSTVTLPQLLAHLVSHYPAIPAARCLAQFFFFYAFGVTDTLVISVMALDRYVAICDPLHYALVMNRQRCACLLALSWVVSILHTMLHVGLLLPLCWTGDAGGNVNLPHFFCDHRPLLRASCSDIHSNELAIFLEGGFLMLGPCALIVLSYVRIGATILRLPSAAGRRRAVSTCGSHLTMVGFLYGTIIWVYFQPPSQNSQYQDMVAAVMYTAITPLANPFVYSLRNKDVKGALHRLLEWGRVDS

SEQ ID NO: 486 - protein, 313 aa, Artificial Sequence
  OR1D2 consensus-c
MDGGNQSGGSEFLLLGISESPEQQRILFWMFLSMYLVTVVGNVLIILAISSDSRLHTPMYFFLANLSFTDLFFVTNTIPKMLVNLQSQNKAISYAGCLTQLYFLVSLVALDNLILAVMAYDRYVAICRPLHYTTAMSPGLCILLLSLCWVLSVLYGLIHTLLMTRVTFCGSRKIHYIFCEMYVLLRLACSNTQINHTVLIATGCFIFLTPLGFMIMSYVLIVRAILRIPSASKKYKAFSTCASHLAVVSLFYGTLCMVYLQPLHTYSMKDSVATVMYAVVTPMMNPFIYSLRNKDMHGALGRLLLGKAFQRLT

SEQ ID NO: 487 - protein, 312 aa, Artificial Sequence
  OR1D4 consensus-d
MDGDNQSENSQFLLLGMSESPEQQQILFWMFLSMYLVTVVGNVLIILAISSDSRLHTPMYFFLANLSFTDLFFVTNTIPKMLVNLQSQNKAISYAGCLTQLYFLVSLVTLDNLILAVMAYDRYVAICCPLHYVTAMSPGLCVLLLCLCWGLSVLYGLLLTLLMTRVTFCGPRKIHYLFCEMYVLLRLACSNTHIIHTVLVATGCFIFLTPLGFMTTSYVRIVRTILQIPSASKKYKTFSTCASHLGVVSLFYGTLAMVYLQPLHTYSMKDSVATVMYAVVTPMMNPFIYSLRNKDMHGALGRLLGRPFQRLK

SEQ ID NO: 488 - protein, 314 aa, Artificial Sequence
  OR1E2 consensus-c
MMGRNQTSISEFLLLGLPIQPEQQNLFYALFLAMYLTTLLGNLLIIVLIRLDSHLHTPMYLFLSNLSFSDLCFSSVTMPKLLQNMQSQDPSIPYAGCLTQMYFFLFFSDLESFLLVAMAYDRYVAICFPLHYTAIMSPMLCLSLVALSWVLTTFHAMLHTLLMARLCFCADNVIPHFFCDMSALLKLACSDTRVNELVIFIMGGLILVIPFLLILGSYARIVSSILKVPSSKGICKAFSTCGSHLSVVSLFYGTVIGLYLCPSANNSTLKETVMAMMYTVVTPMLNPFIYSLRNRDMKGALERVICKRKNPFSL

SEQ ID NO: 489 - protein, 312 aa, Artificial Sequence
  OR1F1 consensus-c
MRGANQSSVSEFLLLGLSRQPQQQQLLFVLFLSMYLATVLGNLLILLAISIDSRLHTPMYFFLSNLSFVDICFSSTTVPKMLANHILGTQTISFSGCLTQMYFVFMFVDMDNFLLAVMAYDRFVAVCHPLHYSTKMTHQLCALLVAGSWVIANLNVLLHTLLMARLSFCADNAIPHFFCDVTPLLKLSCSDTHLNEVMILTEGALIMITPFVCILASYMHITCAVLRVPSTKGRWKAFSTCGSHLAVVSLFYGTIIAVYFNPLSSHSAEKDTAATVMYTVVTPMLNPFIYSLRNRDLKGALKKVVGRKVFSV

SEQ ID NO: 490 - protein, 313 aa, Artificial Sequence
  OR1G1 consensus-c
MGWENLTSISEFFLLGLSEQPEQQEVLFGLFLSMYLVTVAGNLLIILAIITDAQLHTPMYFFLANLSLADACFVSTTVPKMLANIWIQNQVISYAGCLSQLYFFMLFVMLEAFLLAVMAYDRYVAICHPLHYIMVMSPGLCVLLVSASWIMNALHSLLHTLLMNSLSFCADHEIPHFFCDINPLLSLSCTDPFINELVIFTTGGLAGLVCVLCLIISYTYIFSTILKIPSAQGKRKAFSTCSSHLSVVSLFFGTSFCVYFSPPSTRSAQKGTVASVMYTVVTPMLNPFIYSLRNRDIKSSLRKLIWVRKIHSP

SEQ ID NO: 491 - protein, 313 aa, Artificial Sequence
  OR1I1 consensus-c
MEPENQTEVSEFLLLGLSEKPEHQTLLFGLFLSMYLVTIFGNLLIILAIITDSHLHTPMYFFLSNLSLVDIFFSSTTVPKMLVNLWTQSRAIPFAGCLAQMYAFHLFGTMDSFLLAVMAIDRFVAIVHPLRYLVIMSPRVCGLLVGGSWLITNLQSLVHTCLMAQLTFCAGSEIPHFFCDLMPLLKLSCSDTHTNELVIFAFGIVMGISPLSCILLSYICIFWAVFKIPSAQGKWKAFSTCGSHLTVVSLFYGTIFAVYLQPASPSSSQKDKAAALMCGVVIPMLNPFIYSLRNKDMKAALRKLIGKVAVCPR

SEQ ID NO: 492 - protein, 313 aa, Artificial Sequence
  OR1J1 consensus-c
MRPENQSSVSEFLLLGLPIRPEQQGVFFALFLGMYLTTVLGNLLIILLIRLDSRLHTPMYFFLSHLAFTDISFSSVTVPKMLMNMQTQHKSIPYKGCISQTYFFIFFADLDSFLITSMAYDRYVAICHPLHYTTIMSQSQCVMLVAGSWVIACACALLHTLLLARLSFCADHTIPHFFCDLAALLKLSCSDTSLNQLVIFTAGLTAIMLPFLCILVSYGHIGATILRVPSTKGICKALSTCGSHLSVVTLYYGAIIGLYFLPSSNNTNDKNIIASLMYTVVTPMLNPFIYSLRNKDMKGALRKLLSKKTYSSH

SEQ ID NO: 493 - protein, 312 aa, Artificial Sequence
  OR1J4 consensus-c
MRRNQSSVSEFLLLGLPIRPEQQGVFFALFLGMYLTTVLGNLLIILLIRLDSRLHTPMYFFLSHLALTDVSFSSVTVPKMLLNMQTQDQSIPYAGCVTQMYFFIFFTDLDNFLLTSMAYDRYVAICHPLHYTTIMREGLCNLLVAVSWILSCASALSHTLLLAQLSFCADNTIPHFFCDLVALLKLSCSDTSLNELVIFTVGVAVITLPLICILISYGHIGATILKVPSTKGICKALSTCGSHLSVVSLYYGTIIGLYFFPSSSTSSDKDIIASVMYTVVTPLLNPFIYSLRNRDMKGALEKLFNRATVLSQ

SEQ ID NO: 494 - protein, 316 aa, Artificial Sequence
  OR1K1 consensus-c
MDAANESSEGIPFILLGLTTSPGQQRPLFVLFLVLYVAGILGNGLIVAAIRASPALHAPMYFLLAHLSFADLCFTSVTVPKMLANLLAHDRSISLAGCLTQMYFFFALGVTDSCLLAAMAYDRYVAIRHPLHYATRMSRAVCTALVGTAWLVSHVHSLLHILLMARLSFCASHQVPHFFCDHQPLLRLSCSDTRHIQLLIFTEGAAVVVTPFLLILASYGAIAAAVLRLPSASGRLRAVSTCGSHLAVVGLFYGTVIAVYFQPTSRYEAERGRVATVMYTVVTPMLNPVIYSLRNRDVQGALRALFTGRRISASDS

SEQ ID NO: 495 - protein, 310 aa, Artificial Sequence
  OR1L1 consensus-c
MGRNNLTRPSEFILLGLSSRPEDQKPLFAVFLPIYLITVIGNLLIILAIRSDTRLQTPMYFFLSILSFVDICYVTVIIPKMLVNFLSETKTISYGECLTQMYFFLAFGNTDSYLLAAMAIDRYVAICNPFHYITIMSHRRCVLLLVLSFCIPHLHSLLHILLTNQLIFCASNVIHHFFCDDQPVLKLSCSSHFVKEITVMTEGLAVIMTPFSCIIISYLRILITVLKIPSAAGKRKAFSTCGSHLTVVTLFYGSISYVYFQPLSNYTVKDRIATIIYTILTPMLNPFIYSLRNKDMKQGLAKLMHRMKCQ

SEQ ID NO: 496 - protein, 325 aa, Artificial Sequence
  OR1L3 consensus-c
MGMSNLTRLSEFILLGLSSRPEDQKPLFALFLIMYLVTLMGNLLIILAIRSDPQLQNPMYFFLSILSFADICYTTVIVPKMLVNFLSEKKTISYAECLAQMYFFLVFGNIDSYLLAAMAIDRYVAICNPFHYVTVMNHRCCVLLLAFSIAFSYLHSLLHVLLVNRLTFCASNVIHHFFCDVNPVLKLACSSTFVNEVVAMTEGLASVMAPFVCIIISYLRILIAVLKIPSAAGKHKAFSTCSSHLTVVTLFYGSISYVYFQPLSSYTVKDRIATIIYTVLTSMLNPFIYSLRNKDMKRGLEKLISRIKSQMDRLSTTKTNKICGP

SEQ ID NO: 497 - protein, 311 aa, Artificial Sequence
  OR1L4 consensus-c
METKNYSSSTSGFILLGLSSNPQLQKPLFAIFLIMYLVTVVGNVLIILAIHSDSRLHTPMYFFLSNLSFMDICFTTVIVPKMLVNLLSETKIISYVGCLVQMYFFMAFGNTDSYLLASMAIDRLVAICNPFHYDVVMNPRRCLLMLLGSCTISHLHSLLRVLLMSRLSFCASHVIKHFFCDTQPVLKLSCSDTSSSQIVVMTETLAVIVTPFLCILFSYLRIIITVLRIPSAAGKWKAFSTCGSHLTVVVLFYGSVIYVYFRPLSMYSVVKDRVATVMYTVVTPMLNPFIYSLRNKDMKRGLRKLRDRIHS

SEQ ID NO: 498 - protein, 311 aa, Artificial Sequence
  OR1L6 consensus-c
MEIKNYSSSTSGFILLGLSSNPQLQKPLFAIFLIMYLVTVVGNVLIILAIHSDSRLHTPMYFFLSNLSFMDICFTTVIVPKMLVNLLSETKVISYVGCLVQMYFFMAFGNTDSYLLASMAIDRLVAICNPLHYDVVMNPRRCLLMLLGSCTISHLHSLFRVLLMSRLSFCASHVIKHFFCDTQPVLKLSCSDTSSSQIVVMTETLAVIVTPFLCILFSYLRIIVTVLRIPSAAGKWKAFSTCGSHLTVVALFYGSIIYVYFRPLSMYSVVKDRVATVMYTVVTPMLNPFIYSLRNKDMKRGLKKLRDRIYR

SEQ ID NO: 499 - protein, 309 aa, Artificial Sequence
  OR1L8 consensus-c
MERVNQTSSVSEFILLGLSSRPEDQKPLFILFLTVYLVTITGNLLIILAIRSDPQLQTPMYFFLSFLSFTDICFTTTIVPRMLVNFLSEKTISYAGCLTQMYFIYALGNTDSCLLAVMAFDRYVAICDPFHYVTTMSHHRCVLLVAFSCSLPHLHSLLHTLLLNRLTFCDSNVIHHFLCDLSPLLKLSCSSTFVNEIVIMTEGSVVLVTPFLCIAFSYIRILITVLKIPSAAGKRKAFSTCGSHLTVVTLFYGSIFYVYLQPLSTYTVRDHVATIVYTVLSSMLNPFIYSLRNKDLKQGLRKLMGRRKS

SEQ ID NO: 500 - protein, 313 aa, Artificial Sequence
  OR1M1 consensus-c
MEPRNQTSASQFILLGLSEKPEQETLLFSLFLCMYLVTVVGNLLIILAISIDSHLHTPMYFFLANLSLVDFCLATNTIPKMLVSLQTGSKAISYPCCLTQMYFFHFFGIVDSVIIAVMAYDRFVAICHPLHYATIMSPRLCGLLVGAPWAFSCFISLTHILLMARLVFCGSHEVPHYFCDLTPILRLSCTDTSVNRIFILIVAGMVIATPFVCILASYARILVAIMKVPSAGGRKKAFSTCSSHLSVVALFYGTTIGVYLCPSSVRTAVKEKASAVMYTAVTPMLNPFIYSLRNRDLKGALRKLVNRKITSSS

SEQ ID NO: 501 - protein, 314 aa, Artificial Sequence
  OR1Q1 consensus-c
MDNTNWTSVSHFVLLGISTHPEEQIPLFLLFLLMYAINISGNFAIITLIISAPRLHTPMYIFLSNLALADICFTSTTVPKMLQNIFSPTKAISYMGCLAQTYFFICFAAMENFLLAVMAYDRYIAICHPFRYPMILTRMLCVQMVAMCHALSHLHALLHTFLMGRLIFCADNRIPHFFCDLYPLMKISCSSTYLNTLMIHTEGVIVINGALAFIIASYACIISVVLRIPSAKGKWRAFSTCGSHLTVVAIFYGTLTWVYFRPLSSYSVTKGRIITVMYTVVTPMLNPFIYSLRNGDVKGAFRKWMSRIQTSFFR

SEQ ID NO: 502 - protein, 313 aa, Artificial Sequence
  OR1S1 consensus-c
MHQGNQTTISEFLLLGLSNQAEQQNLLFVLFLGMYLVTVVGNGLIILAISLDSYLHTPMYLFLANLSFADISSISTSVPKMLMNIQTKSQSISYESCITQMYFSIVFVVIDNFLLGVMAYDRFVAICHPLNYTTIMRPRLCILLTVIPWVLSNIVALTHTLLLIQLLFCDHNTLPHFFCDLAPLLKLSCSDTLINELVLFIVGLSVITFPFALILFSYVCIVRAVLRISSTEGKWKAFSTCGSHLTVVLLFYGTIVGVYFFPSSTHPDDTDKIGAVLFTVVTPMMNPFIYSLRNKDMKGALRKLINRKIFSLL

SEQ ID NO: 503 - protein, 325 aa, Artificial Sequence
  OR1S2 consensus-c
MKTLCSFLQISRNMHQENQTTITEFILLGLSNQAEHQNLLFVLFLSMYLVTVVGNGLIILAISLDIYLHTPMYLFLANLSFADISSISNSVPKMLVNIQTNSQSISYESCITQMYFSIVFVVTDNLLLGTMAYDRFVAICHPLNYTTLMRPRFCILLTVISWFLSNIIALTHTLLLIQLLFCDHNTLPHFFCDLAPLLKLSCSDTMINELVLFIVGLSVIIFPFALIFFSYVCIIRAVLRISSTQGKWKAFSTCGSHLTVVLLFYGTIVGVYFFPSSTHPEDTDKIGAVLFTVVTPMMNPFIYSLRNKDMKGALRKLINRKISSL

SEQ ID NO: 504 - protein, 313 aa, Artificial Sequence
  OR2A1 consensus-c
MGENQTMVTEFILLGFCLGPRIQMLLFGLFSLFYIFTLLGNGAILGLISLDSRLHTPMYFFLSHLAIVDIAYACNTVPQMLVNLLHPAKPISFAGCMTQTFLFLTFAHTECLLLVVMSYDRYVAICHPLRYSVIMSWRVCITLAVTSWACGSLLALVHVVLILRLPFCGPHEINHFFCEILSVLKLACADTWLNQVVIFAACVFILVGPLCLVLVSYSRILAAILRIQSGEGRRKAFSTCSSHLCVVGLFFGSAIVMYMAPKSRHPEEQQKILFLFYSFFNPMLNPLIYSLRNAEVKGALRRALCKESHSQLE

SEQ ID NO: 505 - protein, 310 aa, Artificial Sequence
  OR2A5 consensus-c
MTENQTWVTEFILLGFPLSPRIQMLLFGLFSLFYVFTLLGNGAILGLIWLDSRLHTPMYFFLSHLAIVDISYASNNVPKMLANLLNKRKTISFVPCIMQTFLYMAFAHTECLILVMMSYDRYVAICHPLQYSVIMSWRVCTVLAVTSWACGSLLALVHVVLILRLPFCGPHEINHFFCEILSVLKLACADTWLNQVVIFAASVFILVGPLCLVLVSYTRILAAILRIQSGEGRRKAFSTCSSHLCVVGLFFGSAIVMYMAPKSRHPEEQQKILSLFYSLFNPMLNPLIYSLRNAEVKGALKRVLWKQRSK

SEQ ID NO: 506 - protein, 310 aa, Artificial Sequence
  OR2A7 consensus-c
MGDNITSITEFLLLGFPVGPRIQMLLFGLFSLFYVFTLLGNGTILGLISLDSRLHTPMYFFLSHLAVVDIAYACNTVPQMLVNLLHPAKPISFAGCMTQTFLFSTFAVTECLLLVVMSYDRYVAICHPLRYLAIMTWRVCITLAVTSWTIGVLLSLIHLVLLLPLPFCRPQKINHFFCEILAVLKLACADTHINENMVLAGAISGLVGPLSTIVVSYMCILCAILQIQSREGQRKAFSTCSSHLCVVGLFYGTAIIMYVGPRYGNPKEQKKYLLLFHSLFNPMLNPLIYSLRNSEVKNTLKRVLGVERAL

SEQ ID NO: 507 - protein, 310 aa, Artificial Sequence
  OR2A14 consensus-c
MGGNQTWITEVTLLGFQVDPALEIFLFGLFSLFYTLTLLGNGVILGLICLDCRLHTPMYFFLSHLAIVDMSYASNNVPKMLANLVNQKRTISFVPCIMQTFLYLAFAHVECLILVVMSYDRYVAICHPLHYTVIMSWRVCTVLAVTSWVFSFLLALVHLVLILRLPFCGPHEINHFFCEILSVLKLACADTWLNQVVIFAACVFILVGPLCLVLVSYLRILAAILRIQSGEGRRKAFSTCSSHLCVVGLFFGSAIVMYMAPKSRHPEEQQKILSLFYSLFNPMLNPLIYSLRNAEVKGALRRALRKERLT

SEQ ID NO: 508 - protein, 313 aa, Artificial Sequence
  OR2B2 consensus-c
MNWVNESVPQEFILLGFSDRPWLELPLFVVFLVSYILTIFGNLAIILVSRLDFKLHTPMYFFLTNLSLLDLCYTTSTVPQMLVNICSTRKVISYGGCVAQLFIFLALGSTECLLLAVMSFDRFVAICRPLHYSVIMHQRLCLQLAAASWISGFSNSVLQSTWTLQMPLCGHKEVDHFFCEVPALLKLSCVDTTANEAELFFISVLFLLIPVTLILISYAFIVQAVLRIQSAEGRRKAFGTCGSHLIVVSLFYGTAIYMYLQPPSPASKDRGKMVSLFYGIITPMLNPLIYTLRNKDVKGAFKRLVARVFLIKK

SEQ ID NO: 509 - protein, 313 aa, Artificial Sequence
  OR2B3 consensus-c
MNWANESSPKEFILLGFSDRPWLQMPLFVLLLISYTITIFGNVSIMMVCILDPKLHTPMYFFLTNLSILDLCYTTSTVPHMLVNICCNKKTISYGGCVAQLIIFLALGATECLLLAVMSFDRYVAICRPLHYVVIMNYWFCLRMAAFSWLTGFSNSVLQSSLTLNMPRCGHQEVDHFFCEVPALLKLSCADTKPIEAELFFFSVLILLIPVTLILISYGFIAQAVLRIRSAEGRRKAFGTCGSHMVVVSLFFGTAIYMYLQPPSSTSKDWGKMVSLFYGIITPMLNPLIYSLRNKDMKEAFKRVMPRIFFCKK

SEQ ID NO: 510 - protein, 313 aa, Artificial Sequence
  OR2B6 consensus-c
MNWVNESIPQEFILLGFSDRPWLEFPLFVVFLISYTVTIFGNLTIILVSRLDSKLHTPMYFFLTNLSLLDLCYTTSTVPQMLVNLCSTRKVISYGGCVAQLFMFLALGATECVLLAVMSFDRFVAICRPLHYSVIMHQRLCLQLAAASWITGFSNSVWLSTLTLQLPLCGPYVIDHFLCEVPALLKLSCVDTTANEAELFFVSVLFHLIPLTLILISYAFIARAVLRIQSAEGRQKAFGTCGSHLIVVSLFYGTAISMYLQPPSPSSKDRGKMVSLFYGIIAPMLNPLIYTLRNKEVKEAFKRLVARVFLIKK

SEQ ID NO: 511 - protein, 312 aa, Artificial Sequence
  OR2C1 consensus-c
MDGANDSSLEGFILMGVSDHPQLEMIFFIVILFSYLLTLLGNSTIILLSRLDARLHTPMYFFLSNLSSLDLAFTTSSVPQMLINLWGPDKTISYGGCVTQLYVFLWLGATECILLVVMAFDRYVAVCRPLHYTTIMNPRLCWLLAAIAWLGGLGNSVIQSTFTLQLPLCGHRRVDNFLCEVPAMIKLACGDTSLNEAVLNGVCTFFTAVPLSIILISYCYIAQAVLKIRSAEGRRKAFNTCLSHLVVVLLFYGSAIYGYLLPAKTSNQDQGKFISLFYSVVTPMVNPLIYTLRNKEVKGALRRLLGKGREVG

SEQ ID NO: 512 - protein, 317 aa, Artificial Sequence
  OR2F1 consensus-c
MGTDNQTWVSEFILLGLSSDWDTQVSLFVLFLVMYVVTVLGNCLIVLLIRLDSRLHTPMYFFLTNLSLVDVSYATSIVPQLLAHFLAEHKAIPFQSCAAQLFFSLALGGIEFVLLAVMAYDRYVAVCDPLRYSAIMHGALCARLAITSWVSGSINSLVQTTITFQLPMCTNKFIDHISCELLAVVRLACVDTSSNEVAIMVSSIVLLMTPFCLVLLSYIRIISTILKIQSREGRRKAFHTCASHLTVVALCYGMAIFTYIQPHSSPSVLQEKLISLFYAILTPMLNPMIYSLRNKEVKGAWQKLLWKFSGLTSKLAT

SEQ ID NO: 513 - protein, 317 aa, Artificial Sequence
  OR2F2 consensus-c
MEIDNQTWVREFILLGLSSDWCTQVSLFSLFLVTYLMTVLGNCLIVLLIRLDSRLHTPMYFFLTNLSLVDVSYATSIVPQLLAHFLAEHKAIPFQSCAAQLFFSLALGGIEFVLLAVMAYDRYVAVCDPLRYSAIMHGALCARLAITSWVSGSINSLVQTAITFQLPMCTNKFIDHISCELLAVVRLACVDTSSNEAAIMVSSIVLLMTPFCLVLLSYIQIISTILKIQSREGRKKAFHTCASHLTVVSLCYGTTIFTYIQPHSGPSVLQEKLISVFYAIVMPLLNPMIYSLRNKEVKGAWHKLLEKFSGITSKLAT

SEQ ID NO: 514 - protein, 312 aa, Artificial Sequence
  OR2H1 consensus-c
MVNQSSPVGFLLLGFSEHPALERILFVVVLTSYLLTLVGNTLIILLSVLDPRLHSPMYFFLSNLSFLDLCFTTSCVPQMLVNLWGPKKTISFLGCSVQLFIFLSLGTTECILLTVMAFDRYVAVCQPLHYATIIHPRLCWQLAAVAWVMGLVQSIVQTPPTLRLPFCPHRQIDDFLCEVPSLIRLSCGDTTYNEIQLAVSSVIFLVVPLSLILVSYGAIARAVLRINSATAWRKALGTCSSHLTVVTLFYSSVIAVYLQPKNPYAQKRGKFFGLFYAVGTPSLNPLIYTLRNKEVKRAFRRLLGKDRDSRES

SEQ ID NO: 515 - protein, 312 aa, Artificial Sequence
  OR2H2 consensus-c
MVNQSSPPGFLLLGFSEHPGLEKILFVVVLTSYLLTLVGNTLIILLSALDPRLHSPMYFFLSNLSFLDLCFTTSCVPQMLVNLWGPKKTISFLGCSVQLFIFLSLGTTECILLTVMAFDRYVAVCQPLHYATIIHPRLCWQLASVAWVIGLVESVVQTPSTLHLPFCPHRQVDDFVCEVPALIRLSCGDTTYNEIQMAVASVFILVVPLSLILVSYGAIARAVLRINSAKGRRKAFGTCSSHLTVVTLFYSSVIAVYLQPKNPYAQERGKFFGLFYAVGTPSLNPLIYTLRNKEVKRAFRRLLGKEMGLTQS

SEQ ID NO: 516 - protein, 316 aa, Artificial Sequence
  OR2K2 consensus-c
MQGENLTIWSFFFLEGFSRYPGLEIVLFVFSLVMYLITLLGNSTLILITILDSRLQTPMYLFLGNLSFMDICYTSASIPTLLVNLLSSQKTIIFSGCAVQMYLSLAMGSTECVLLAVMAYDRYVAICNPLRYPIIMNRQVCVQMATVSWVTGCLTALLETSFALQIPLCGNLIDHFTCEILAVLKLACTSSLLMDTIMLVVSVLLLPIPMLLICISYVFILSTILRISSAEGRNKAFSTCGAHLTVVILYYGAALSMYLKPSSSNSQEIDKIISLLYGVLTPMLNPIIYSLRNKEVKDAMKKLLGKITLHQTHEHL

SEQ ID NO: 517 - protein, 319 aa, Artificial Sequence
  OR2S2 consensus-c
MEKANETSPVMGFILLGLSAHPELEKTFFVLILLMYLVILLGNGVLILVTILDSRLHTPMYFFLGNLSFLDICYTTSSVPLVLDSFLTPRKTISFSACAVQMFLSFAMAGTECVLLSMMAFDRYVAICNPLRYPVVMSKAAYVPMAASSWAIGGAASVVHTSLAIQLPFCGDNVINHFTCEILAVLKLACADISINVISMGVTNVIFLGVPVLFISFSYVFIIATILRIPSAEGRKKAFSTCSAHLTVVVIFYGTLFFMYGKPKSKDSLGADKEDLSDKLIPLFYGVVTPMLNPIIYSLRNKDVKAAVRNLVRQKGFTQ

SEQ ID NO: 518 - protein, 315 aa, Artificial Sequence
  OR2V1 consensus-c
MGRWVNQSYTDGFILLGIFSHSQTDLVLFSAVMVVFTVALCGNVLLIFLIYMDPQLHTPMYFFLSQLSLMDLMLVCNIVPKMAANFLSGRKSISFVGCGIQIGFFVSLVGSEGLLLGLMAYDRYVAISHPLHYPILMNQKVCLQITGSSWAFGIIDGVIQMVAAMSLPYCGSRNVDHFFCEVQALLKLACVDTSLFDTLLFACCVFMLLLPFSIIVASYACILGAVLRMRSAQTWKKALATCSSHLTAVTLFYGAAMFMYLRPRRYRAPSHDKVASIFYTVLTPMLNPLIYSLRNQEVMGALRKGLNHCRIGSQH

SEQ ID NO: 519 - protein, 315 aa, Artificial Sequence
  OR2V2 consensus-c
METWLNQSSTDDFILLGIFSHSPTDLVLFSVVMVVFTVALCGNVLLIFLIYMDPRLHTPMYFFLSQLSLMDLMLVCTNVPKMAVNFLSGRKSISFVGCGIQIGLFVCLVGSEGLLLGLMAYDRYVAISHPLHYPILMNQRVCLQIVGSSWAFGIIDGLIQMVVVMTFPYCGLREVNHFFCEMLSLLKLACVDTSLFENVIFACCVFMLLLPFSIIVASYARILGTVLQMHSAQAWKKALATCSSHLTAVSLFYGAAMFIYLRPRRYRAPSHDKVVSIFYTVLTPMLNPLIYSLRNREVMGALRKGLDRCRIGSQH

SEQ ID NO: 520 - protein, 314 aa, Artificial Sequence
  OR2Z1 consensus-c
MGDVNQSVTSDFILVGLFSHSGSHQLLFSLVAVMFTIGLLGNTILLFLIRVDSRLHTPMYFLLSQLSLLDVGFPLVTIPKMASDFLQGEGSISFGGCAAQIFFLMLMGVAEGVLLALMSYDRYVAVCHPLQYPVLMRRQVCLLMVGSSWLVGVLNASIQTSITLHFPYCASRIVDHFFCEVPALLKLSCADTSAYELALSTSGVLILLLPLSLIATSYGHVLGAVLRMRSEEARHKAFTTCSSHITVVGLFYGAAVFMYMVPGAYHSPQQDNVVSLFYSLVTPTLNPLIYSLRNREVRMALVKVLSRAGLRQKC

SEQ ID NO: 521 - protein, 312 aa, Artificial Sequence
  OR2AE1 consensus-c
MWQRNQTSLADFILEGLFDDSLTHLFLFSLTMVVFLIAVSGNTLTILLICADPRLHTPMYFLLSQLSLMDLMHVSTTIPKMATNYLSGKKSISFVGCATQHFLYLSLGGAECLLLALMSYDRYVAICHPLRYTVLMNRKVGLMMAVMSWLGASVNSLIHTAILMHFPFCGPRKIHHFYCEFPAVVKLVCGDITVYETTVYISSILLLLLPIFLVSTSYVFILHSVIQMRSAGSKRNAFATCSSHLTVVSLWFGACIFSYMRPRSQRTPLQDKVGSVFYSIITPTLNPLIYTLRNKDVAKALRRVLGRDVITQ

SEQ ID NO: 522 - protein, 309 aa, Artificial Sequence
  OR2AP1 consensus-c
MKNKTVLTEFILLGLTDVPELQVAVFTFLFLAYLLSIIGNLTILILTLLDSHLQTPMYFFLRNFSFLEISFTNIFIPRVLISITTGNKSISFAGCFTQYFFAIFLGATEFYLLAAMSYDRYVAICKPLHYTTIMSSRVCTQLVLCSWLAGLMVIIPPITLMSQQDFCASNRLNHYFCDYEPLRELSCSDTSLIEKVVFLVASVTLVVTLVLVILSYTFIIRTILKLPSAQQRTKAFSTCSSHMIVISLSYGSCFFMYIKPSAKEGDTFNKGVALLITSVAPLLNPFIYTLRNQQVKQAFKDMVKKLVNL

SEQ ID NO: 523 - protein, 319 aa, Artificial Sequence
  OR2AT4 consensus-c
MEATACNESGSPVFYLVGIPSLPETFFLPVFFIFLLFYLLILMGNALILVAVVAEPSLHKPMYFFLINLSALDILFTTTTVPKMLSLFLLGDRFLSFPACFLQMYLFHSFTCSEAFILVVMAYDRYVAICRPLHYPVLMTPQTNAALAASAWLTALLLPIPAVVQTSQMAFNSIAYIYHCFCDHLAVVQASCSDTTPQTLMGFCIAMVVSFLPLLLVLLSYAHILASVLRISSREGRSKAFSTCSSHLLVVGTYYSSIAIAYVAYRADLPLDFHIMGNVVYAILTPILNPLIYTLRNKDVKAAITKIMSQDPGCDRSIL

SEQ ID NO: 524 - protein, 315 aa, Artificial Sequence
  OR3A1 consensus-c
MQPESGANGTAVTEFILLGLVETPGLQPVVFVLFLFAYLVTVGGNLSILAAILVEPKLHTPMYFFLGNLSVLDVGCITVTVPSMLSRLLSHKRTVPYGACLTQLFFFHLLVGVDCFLLTAMAYDRFLAICRPLTYSTRMSQTVQRILVAVSWACAFTNALTHTVAISTLNFCGPNVINHFYCDLPQLFQLSCSSTQLNELLLFAVGFIMAGTPMALIVTSYIHVAAAVLRIRSAEGRKKAFSTCGSHLTVVAIFYGSGIFNYMRLGSTKLSDKDKAVGIFNTVINPMLNPIIYSLRNPDVQGALWRVLTGRRSLA

SEQ ID NO: 525 - protein, 315 aa, Artificial Sequence
  OR3A3 consensus-d
MEPEAGTNRTAVTEFILLGLVETEELQSVVFVLFLFAYLVTVGGNLSILAAILVEPKLHTPMYFFLGNLSVLDVGCITVTVPAMLGRLLSHKRTISYDACLSQLFFFHLLAGMDCFLLTAMAYDRFLAICRPLTYSTRMSQTVQRMLVAVSWACAFTNALTHTIALTTLNFCGPNEVNHFYCDLPQLFQLSCSSTQLNELLLFAAGFFMAGAPLVLIIVSYAHVAAAVLRIRSVEGRKKAFSTCGSHLTVVCLFYGTGIFNYMRLGSEEASDKDKGVGVFNTVINPMLNPLIYSLRNPDVQGALWRVLVGRRSLT

SEQ ID NO: 526 - protein, 315 aa, Artificial Sequence
  OR4A5 consensus-c
MGQSNNVTEFVLLGLTQDPGGQKALFVMFLLIYIVTMVGNLLIVVTVIASPSLGSPMYFFLACLSLMDAVYSTTISPKLIVDLLCDKKTISFQACMGQLFIEHLFGGAEVFLLVVMAYDRYVAICKPLHYLTIMNRQVCILLLVVAWIGGFVHSVVQILFVYSLPFCGPNVIDHFSCDMYPLLELACTDTYFIGLTVVANGGAICMVIFILLLISYGVILNSLKTHSQEGRRKALSTCSSHITVVVLFFVPCIFMYVRPVSNFPIDKFMTVFYTVITPMLNPLIYTLRNSEMKNAMEKLWCKKLTIFIIGGVSVL

SEQ ID NO: 527 - protein, 311 aa, Artificial Sequence
  OR4A15 consensus-c
MENRNNVTEFVLLGLTQNPEGQKVLFVTFLLIYIVTIMGNLLIIVTIMASQSLGSPMYFFLAYLSFIDAVYSTAIAPKMIVDLLYEKKTISFQACMTQVFIDHLFAGAEVILLVVMAYDRYVAICKPLHYLIIMNRRVCVLMLLAAWIGGFLHSLVQFLFIYQLPFCGPNVIDNFLCDMYPLLKLACTNTYLIGLSMIANGGAICTVIFFILLLSYGVILHSLKTHSLEGKRKALYTCASHITVVILFFVPCIFLYARPNSTFPIDKSMTVVLTFITPMLNPLIYTLRNAEMKNAMRKLWSKKVSLAGKWL

SEQ ID NO: 528 - protein, 309 aa, Artificial Sequence
  OR4A47 consensus-c
MEPRNNVTYFVLLGLTQNPKEQKVLFVMFLLFYILTMVGNLLIVVTVTVSKTLGSPMYFFLASLSFMDVIYSSSISPRLISDLFFGENTISFQSCMTQLFTEHFFGGSEVFLLLVMAYDRYVAICKPLHYLVIMRQWVCVVLLVVSWVGGFLHSVIQLSTIYGLPFCGPNVIDHFFCDMYPLLKLVCTDTYVIGLLVVANGGLICTIVFLLLLISYGVILHSLKNLSQEGRRKALQTCGSHITVVVFFFVPCIFMYARPAKTFPIDKSLSVFYTVITPMLNPLIYTLRNSEMTNAMKKLWRRDLISSST

SEQ ID NO: 529 - protein, 309 aa, Artificial Sequence
  OR4B1 consensus-c
MASTNNVTELIITGLFQDPEVQRVCFVVFLPVYLATVVGNGLIVLTVSVSKSLDSPMYFFLSYLSLVEISYSSTVVPKFITDLLAKIKTISLEGCLAQIFFFHFFGVTEILLLVVMAYDRYVAICKPLHYMNIMSRQLCHLLVAGSWLGGFCHSIIQILITIQLPFCGPNVIDHYFCDLQPLFKLACTDTFVEGVIVLANSGLISVFSFLILVSSYIVILVNLRNHSAEGRRKALSTCASHITVVILFFGPAIFLYMRPSSTFTEDKLVAVFYTVITPMLNPIIYTLRNAEVKIAMRRLWGKKENSGRE

SEQ ID NO: 530 - protein, 302 aa, Artificial Sequence
  OR4C3 consensus-c
MEIPHNITEFFMLGLSQNPEVQRVLFVVFLIIYVVTVCGNMLIVVTITSSPTLASPMYFFLANLSFIDTCYSSSMAPKLIADSLYEGRTISYEGCMAQLFGAHFLGGVEIILLTVMAYDRYVAICKPLHYTTIMTRHLCALLVGVAWLGGFLHSLVQLLLVLQLPFCGPNVINHFVCDLYPLLELACTNTYVIGLLVVANSGVICLLNFLMLAASYIVILYSLRSHSAEGRRKALSTCGAHFTVVALFFVPCIFTYMRPSSTLSIDKNMAVFYGILTPMLNPLIYTLRNEEVKNAMRKLFTW

SEQ ID NO: 531 - protein, 307 aa, Artificial Sequence
  OR4C6 consensus-c
MENQNNVTEFILLGITENPELRKIFSAVFLIMYVATVLGNLLIVVTIITSQSLRSPMYFFLTSLSLLDVTYSSVIAPKMIVDSLSESTTISLEGCMTQLFAEHFFGGVGIILLIVMAYDRYVAICKPLHYMTIMSPRVCCLLLGGAWVGGFMHATIQLLFMYQIPFCGPNVIDHFMCDLFPLLKLACMDTHILGLLVILNSGVMCVAIFLILIASYVVILCSLKSYSSEGRRKALSTCGSHLTVVVLFFVPCIFLYVRPVVTYPIDKAMAVSDTIVTPMLNPLIYTLRNAEVKNAMRKLWMKWEALK

SEQ ID NO: 532 - protein, 310 aa, Artificial Sequence
  OR4C11 consensus-c
MQQNNSVTEFILLGLTQDPLRQKMVFVIFFIFYMGTVVGNLLIIVTIKSSRTLGSPMYFFLFYLSLADSCFSTSTAPRLIVDALSAKKIISYNECMTQVFALHLFGCMEIFVLILMAVDRYVAICKPLRYPTIMRRQVCIILIVLAWIGSFIHSIAQIILALRLPFCGPNLIDHYCCDLQPLLKLACMDTYMINLLLVSNSGAICSSSFVILMISYIVILHSLRNHSAEGRKKALSTCTSHIIVVILFFGPCIFIYTRPPTTFPMDKMVAVFYTIGTPFLNPLIYTLRNAEVKNAMRKLWHIKITSENKG

SEQ ID NO: 533 - protein, 308 aa, Artificial Sequence
  OR4C12 consensus-c
MENKRNVTEFILIGLTQNPIMQKVVFVVFLVLYMVTLSGNLLIVVTITTSQALSSPMYFFLTHLSLIDTIYSSSSAPKLIVDSLQEKKIISFNGCMAQVYAEHIFGATEIILLTVMAYDRYVAICKPLHYTTIMSHSLCILLVGVAWTGGFLHATIQILFTVWLPFCGPNVIDHFMCDLYPLLKLVCMDTHTLGLFVAANSGFICLLNFLLLMVSYVVILRSLKNYSLEGRRKALSTCVSHITVVVLFFVPCIFVYLRPVTTLPIDKAVAVFYTMVAPMLNPLIYTLRNAEVKNAMRKLWRKKVTSDN

SEQ ID NO: 534 - protein, 310 aa, Artificial Sequence
  OR4C16 consensus-c
MQLNNNVTEFILLGLTQDPFRKKIVFVIFLLFYLGTLLGNLLIITTIKTSQALGSPMYFFLFYLSLSDTCFSTSIAPRMIVDALLKKTTISFSECIIQVFSFHFFGCLEIFILILMAVDRYVAICKPLHYMTIMSQRVCGVLVAVAWVGSCVHSLAQIFLALSLPFCGPNVIDHYFCDLQPLLKLACSDTYVVNLLLVSNSGAICTVSFVMLMFSYVIILHSLRNHSAEGRRKALSTCISHIIVVILFFGPCIFIYTRPATTFPMDKMIAVFYTVGTPLLNPLIYTLRNAEVKNAMRKLWSKKLISDDKR

SEQ ID NO: 535 - protein, 309 aa, Artificial Sequence
  OR4C46 consensus-c
MENRNNVTEFVLLGLTENPKMQKIIFVVFFVIYIISVVGNVLIVVTITASPLLGSPMYFFLAYLSFIDACYSSVNTPKLITDSLYEKKTILFNGCMTQIFGEHFFGGAEVILLTVMAYDRYVAICKPLHYTTIMNRRVCGLLMGVVWVGGFLHATIQILFIFQLPFCGPNVIDHFMCDLNPLLNLACTDTHTLGLFVAANSGFICLLNFLLLMVSYVVILRSLRNHSLEARRKALSTCVSHITVVVLFFVPCIFVYMRPAATLSIDKAVAVFYTMITPMLNPLIYTLRNAQMKNAIRKLCSRKDISGDK

SEQ ID NO: 536 - protein, 311 aa, Artificial Sequence
  OR4D1 consensus-c
MEPQNTTWVSEFVLLGFSQTQELQKFLFLVFLFVYVTTVVGNLLIMVTVTFDSRLHTPMYFLLRNLAVIDLCYSTVTSPKMLVDFFHETKTISYQGCMAQIFFFHLLGGGTVFFLSVMAYDRYIAISRPLHYVTIMNTRLCVGLVVAAWVGGFVHSIVQLALMLPLPFCGPNVLDNFYCDVPQVLRLACTDTSLLEFLMISNSGMLVLIWFLLLLISYTVILVMLRSHSGQARRKAASTCTTHIIVVSMIFIPCIYIYSRPFTPFPMDKAVSISYTVMTPMLNPMIYTLRNQEMQAAMKRLGKCLVICRRE

SEQ ID NO: 537 - protein, 311 aa, Artificial Sequence
  OR4D2 consensus-c
MEPGNLTWVSEFVFLGLSQTRELQLFLFLVFLFVYTTTVMGNLLIIVTVTSDSRLHTPMYFLLRNLAVLDLCFSSVTAPKMLVDFLSEKKTISYQGCMAQIFFFHFLGGAMVFFLSVMAYDRLVAISRPLHYVTIMNTQLCVGLVVAAWVGGFVHSIVQLALMLPLPFCGPNVLDNFYCDVPQVLRLACTDTSLLEFLMISNSGMLDVIWFFLLLMSYSVILVMLRSHSGQARRKAASTCTTHIIVVSMVFIPSIYLYARPFTPFSMDKAVSISHTVMTPMLNPMIYTLRNQEMQAAVKRLGRHRLVCKRE

SEQ ID NO: 538 - protein, 311 aa, Artificial Sequence
  OR4D9consensus-c
MDQGNYTRVKEFIFLGITQSRELSWVLFTFLFLVYMTTLMGNLLIMVTVTCESHLHTPMYFLLRNLSVLDICFSSITAPKVLVDLLSERKTISFNGCVTQMFFFHLLGGADVFSLSVMAFDRYIAISKPLHYMTIMSRGRCTALIVASWVGGFVHSIVQISLLLPLPFCGPNVLDTFYCDVPQVLKLACTDTFTLELLMISNNGLVSWFIFFFLLVSYTVILMMLRSHTGEGRRKAISTCTSHITVVTLHFVPCIYVYARPFTALPTDTAISVTFTVISPLLNPMIYTLRNQEMKSAMRRLKKRLGQSERI

SEQ ID NO: 539 - protein, 311 aa, Artificial Sequence
  OR4D11 consensus-c
MELGNVTRVKEFIFLGLTQSQDLSLVLFLFLCLVYMTTLLGNLLIMVTVTCESRLHTPMYFLLRNLAILDICFSSITAPKVLVDLLSKKKTISYTSCMTQMFFFHLLGGADIFSLSVMAFDRYMAISKPLHYVTIMSRGRCTALIVASWVGGFVHSIVQISLLLPLPFCGPNVLDTFYCDVPQVLKLACTDTFALELLMISNNGLVTTLWFIFLLVSYTVILMMLRSQAGEGRRKAISTCTSHITVVTLHFVPCIYVYARPFTALPTDKAISVTFTVISPLLNPLIYTLRNQEMKSAMRRLKRRLVPSERE

SEQ ID NO: 540 - protein, 305 aa, Artificial Sequence
  OR4F17 consensus-c
MVTEFIFLGLSNSQGLQIFLFVFFFVFYVGIVFGNLLIVITVVSDSHLHSPMYFLLANLSLIDLCLSSVTAPKMITDFFSKRKVISFKGCLAQIFLLHFFGGSELVILIAMAFDRYVAICKPLHYTTIMCGNVCVGIVAAAWGIGFLHSVSQLAFAVNLPFCGPNEVDSFYCDLPRVIKLACTDTYRLDIMVIANSGVLTVCSFVLLIISYTIILMTIQHRPSDRSSKALSTLTAHITVVLLFFGPCIFIYAWPFPIKSLDKFLAVFYSVVTPLLNPIIYTLRNKDMKTAMRQLRKWNVNSRVKS

SEQ ID NO: 541 - protein, 312 aa, Artificial Sequence
  OR4F21consensus-c
MDGENHSVVSEFVFLGLTNSWEIQLLLLVFSSVLYVASMTGNIFIVFSVTTDPHLHSPMYFLLANLSFIDLGACSVTSPKMIYDLFRKHKVISFGGCIAQIFFIHVIGGVEMVLLIAMAFDRYVAICKPLHYLTIMSPRMCILFLAAAWTLGVSHSLFQLAFIVNLPFCGPNVLDSFYCDLPRLLRLACTDTYRLQFMVTVNSGFICVGSFFILLISYVFILFTVWKHSSGGSSKALSTLSAHITVVLLFFGPTMFVYTWPHPNSQMDKFLALFDAVLTPFLNPVIYTFRNKEMKAAMKRVCRQLVIYRKIS

SEQ ID NO: 542 - protein, 309 aa, Artificial Sequence
  OR4P4 consensus-c
MEKRNNVTVFILLGLSQNKNIEILCFVLFLFCYIAIWMGNLLIMISITCSQLIHQPMYFFLNYLSLSDLCYTSTVTPKLMTDLLAERKTISYNNCMTQLFTTHFFGGIEIFILTGMAYDRYVAICKPLHYTIIMSRQRCNTIIIACCTGGFIHSASQFLLTIFLPFCGPNEIDHYFCDVYPLLKLACTDTHMIGLLVIANSGLIALVTFVVLMLSYFFILYTIRAYSAESRSKALSTCSSHVTVVVLFFAPALFIYIRPATTFPEDKVFALFYTIIAPMFNPLIYTLRNTEMKNAMRKVWCCQILLKRK

SEQ ID NO: 543 - protein, 308 aa, Artificial Sequence
  OR4X1 consensus-c
MAATSNVTEIIFLGFSQNWSVQKVISVMFLLMYTAIVLGNGLIVVTIMASKGLTSPMYFFLSYLSFVEICYCSVTAPKLIFDSFIERKVISLKGCITQIFFLHFFGGTEIFLLTVMAYDRYVAICKPLHYTAIMNRRVCGLLVGAAWGGGLLHSVGQTFLIFQLPFCGPNIIDHYFCDVHPVLKLACSDTFLIGLLIITNGGSISVVSFFVLLASYVVILHSLRHTSEGRRKALSTCASHVAVVGLFFIPCSFVYMRPCVTLPADKIVAVFYTVVTPLLNPVIYSFRNAEVKNAMRRLMGRKVIWEEK

SEQ ID NO: 544 - protein, 309 aa, Artificial Sequence
  OR4X2 consensus-c
MANTHNVTEFIFLGLSPNQEVQRVCFVIFLLLYTAIVLGNFLIVLTVMTSRSLGSPMYFFLSYLSFVEICYSSTTAPKLISDLLAERKAISLWGCMTQLFFLHFFGGTEIFLLTVMAYDRYVAICKPLSYTTIMNRQVCAVLVGIAWVGGFVHSFAQILLIFHLPFCGPNVIDHYFCDVLPLLKLACSDTFLIGLLIVANGGTLSVISFVVLLASYVVILLHLRTRSSEGRRKALSTCGSHITVVILFFGPCIFIYLRPSTTLPVDKMVAVFYTVITPLLNPVIYSLRNAEVKKAMKRLWIRTMKLNEK

SEQ ID NO: 545 - protein, 311 aa, Artificial Sequence
  OR5B2 consensus-c
MENCTEVTKFILLGLTSAPELQIPLFILFTLIYLITVCGNLGMILLILLDSCLHTPMYFFLSNLSLVDFGYSSAVTPKVMAGLLRGDKVISYNACAAQMFFFVAFATVENYLLASMAYDRYAAVCKPLHYTTTMTTSVCACLAIGSYVCGFLNASFHVGDIFSLSFCKSNLVHHFFCDVPAVMALSCSDKHTSEVILVFMSSFNVFFALLVILISYLFIFITILKMHSAQGHQKALSTCASHLTAVSIFYGTVIFMYLQPSSSHSMDTDKMASVFYAMVIPMLNPVVYSLRNKEVKNAFKKVVEKAKFSLG

SEQ ID NO: 546 - protein, 314 aa, Artificial Sequence
  OR5B12 consensus-c
MENSTEVTEFILVGLTDDPELQIPLFIVFLLIYLITLVGNLGMIELILLDSRLHTPMYFFLSNLSLVDFGYSSAVTPKVMAGFLTGDKFISYNACATQFFFFVAFITVESFLLASMAYDRYAAVCKPLHYTTTMTTNVCACLAIGSYVCGFLNASIHTGNIFRLSFCRSNVVDHFFCDAPPLLALSCSDNYISEMVIFFVVGFNDLFSILVILISYLFIFITILKMRSSEGRQKAFSTCASHLTAVSIFYGTGIFMYLQPSSSHSMGTDKMASVFYTMVIPMLNPLVYSLRNKEVKSAFKKAVGKAKSSIGFIF

SEQ ID NO: 547 - protein, 314 aa, Artificial Sequence
  OR5B17 consensus-c
MENNTEVSEFILLGLTNAPELQVPLFIMFTLIYLITLTGNLGMIILILLDSRLHTPMYFFLSNLSLVDFCYSSTVTPKVMAGLLIEDKVISYNACAAQMFFFAVFATVENYLLSSMAYDRYAAVCKPLHYTTTMTTRVCACLAIGCYVIGFLNASIQIGDTFRLSFCMSNVIHHFFCDIPAVMTLTCSDKHISELILVLISSFNVFFALLVILISYLFIFITILKMHSGEGYQKALSTCASHLIAVSIFYGTVIIMYLQPSSSHSMDTDKIASVFYTMVIPMLNPIVYSLRNKEVKNAFKKVVEKAKYSLGSVF

SEQ ID NO: 548 - protein, 313 aa, Artificial Sequence
  OR5H1 consensus-c
MEEENATLLTEFVLTGFLYQPQWKIPLFLAFLVIYLITIMGNLGLIAVIWKDPHLHIPMYLLLGNLAFVDAWISSTVTPKMLINFLAKSKMISLSECKIQFFSFAISVTTECFLLATMAYDRYVAICKPLLYPVIMTNGLCIRLLILSYVGGLLHALIHEGFLFRLTFCNSNIVHHIYCDIIPLFKISCTDSSINFLMVFIFSGSIQVFSIVTILVSYTFVLFTILKKKSDKGVRKAFSTCGAHLFSVSLYYGPLLFMYVGPASPQADDQDMVEPLFYTVIIPLLNPIIYSLRNKQVTDSFTKMLKRNVKVSY

SEQ ID NO: 549 - protein, 309 aa, Artificial Sequence
  OR5H2 consensus-c
MEQDNATLLTEFVLTGLTYQPEWQIPLFLVFLVIYLITIVGNLGLIALIWNDPQLHIPMYLFLGSLAFVDAWISSTVTPKMLVNFFAKSKMISLSECMIQFFSFAFSGTTECFLLATMAYDRYVAICKPLLYPVIMTNSLCIRLLVLSFLGGFLHALIHEVFLFRLTFCNSNIIHHFYCDIIPLFKISCTDPSINFLMVFIFSGSIQVFTILTVLVSYTLVLFTILKKKSVQGIRKAFSTCGAHLLSVSLYYGPLLFMYVRPGSAQADDQDMMDSLFYTVIIPLLNPIIYSLRNKKVIDSLTKMLKRNV

SEQ ID NO: 550 - protein, 309 aa, Artificial Sequence
  OR5H6 consensus-c
MEEENATLLTEFVLTGFLYQPDCKIPLFLAFLVIYLITIMGNLGLIVLIWKDPHLHIPMYLFLGSLAFVDALLSSTVTPKMLINFLAKSKMISLSECMIQFFSFVTTVTTECFILATMAYDRYVAICKPLLYPVIMTNELCIQLLVLSFLGGLLHALIHEAFLFRLTFCNSNIIQHFYCDIIPLLKISCTDSSINFLMVFIFAGSIQVFTIGTILISYTLILLTILKKKSIKGIRKAVSTCGAHLLSVSLYYGPLAFKYLGSASPQADDQDMMESLFYTVIVPLLNPMIYSLRNKQVIDSFTKMFKRNV

SEQ ID NO: 551 - protein, 310 aa, Artificial Sequence
  OR5H14 consensus-c
MEEENATLLTEFVLTGFLYQPQWKIPLFLAFLVIYLITIMGNLGLIAVIWKDPHLHIPMYLFLGNLAFVDALLSSTVTPKMLINFLAKSKMISLSECKIQFFSFAIGVTTECFLLATMAYDRYVAICKPLLYPVIMTNGLCIRLLVLSFLGGLLHALIHEGFLYRLTFCNSNIIHHFYCDIIPLLKISCTDSSINFLMVFIFSGSIQVFTIGTVLISYTFVLYTILKKKSVKGIRKAFSTCGAHLLSVSLYYGPLAFMYVGSASPQADDQDMMESLFYTVIVPLLNPIIYSLRNKQVIDSLTKMFKRNDV

SEQ ID NO: 552 - protein, 309 aa, Artificial Sequence
  OR5K3 consensus-c
MTEDNHSLTAEFILTGFTDHPKLKTLLFVVFFAIYLITMVGNLGLVALIYMERRLHTPMYIFLGNLALMDSCCSCAITPKMLENFFSEDRRISLYECMAQFYFLCLAETTDCFLLAAMAYDRYVAICNPLQYHTMMSKKLCIQMTTGAYIAGNLHPMIEVGLLFRLTFCGSHQINHFFCDVLPLYRLSCVDPYINELMLFILAGSIQIFTITIVLISYFYILFTIFTMKSKEGRGKALSTCASHFLSVSIFYGSLLFMYARPGSVNEGDKDIPVAIFYTLVIPLLNPFIYSLRNKEVINVMKRIMKKRK

SEQ ID NO: 553 - protein, 309 aa, Artificial Sequence
  OR5AK2 consensus-c
MTLGNSTEVTEFYLLGFGAQHEFWCILFIVFLLIYVTSMVGNTGMILLINTDSRLQTPMYFFLQHLAFVDICYTSAITPKMLQNFTEENKSISFQGCVIQLLVYATFATSDCYLLAAMAVDRYVAICKPLHYPIIMSRTVCIQLVAGSYIMGSINASVHTGFTFSLSFCKSNSINHFFCDVPPILALSCSNIDINIMLLVVFVGFNLIFTVLVVIFSYIYIMATILKMSSSAGRKKSFSTCASHLTAVTIFYGTLSYMYLQPHSNNSQENMKVASVFYGIVIPMLNPLIYSLRNKEVKEALKVIGKKFF

SEQ ID NO: 554 - protein, 311 aa, Artificial Sequence
  OR5AR1 consensus-c
MDKENSTMVTEFILMGITQDPQMEILFFVVFLIIYLVNVVGNIGMIILITLDSQLHNPMYFFLWHLSFCDICYSSAIAPRMLSDLLSESRTISFSSCAAQFYFFAAFVDAECYILAVMAYDRFVAICNPLLYSTAMSKSLCIALLLGSYIAGTTSAIIHTTATFSLSFCSSNLINHFFCDVPPLLAISCSDTHINEILLFSFCGFVEFSSLSIILISYIFILAAVLRMRSGRLKAFSTCGSHFTGVTLFYGTVIFMYLRPTSVYALDQDKWASVFYTVVIPMLNPLIYSLRNKDVKEAFRKLIGKKLNSVL

SEQ ID NO: 555 - protein, 312 aa, Artificial Sequence
  OR5AS1 consensus-c
MLESNYTMPTEFLLVGFTDYLPLRVTLFLVFLIVYTLTMVGNIGLIILVNINSSLQTPMYYFLSNLSFLDISYSTAITPKMLVNFLASRKSISPYGCALQMFFFACFADAECLILAAMAYDRYAAICNPLLYSTLMSRRVCVCFIVLAYFSGSTTSLVHVCLTFRLPFCGSNIVNHFFCDIPPLLALSCTDTHINELLLFALCGFIQTSTFVVIFISYFCILITVLSIKSSGGRSKTFSTCASHLIAVTLFYGTLLFMYLRPTTSYSLDTDKVVAVFYTVVFPMFNPIIYSFRNKDVKNALKKLLERIGYSN

SEQ ID NO: 556 - protein, 311 aa, Artificial Sequence
  OR6B1 consensus-c
MEVENQTRVTKFILVGFPGSLSMRAAMFLIFLVAYILTVAENVIIILLVQQNRPLHKPMYFFLANLSFLETWYISVTVPKLLFSFWSVSNSISFTHCMIQLYFFIALMCTECVLLAAMAYDRYVAICRPLHYPTIMSHGLCFRLALGSWAIGFGISLAKIYFISRLSFCGPNVINHFFCDISPVLNLSCTDMSIAELVDFVLALVIFLFPLSITVLSYGCILATILRMPTGKQKAFSTCASHLVVVTIFYSATIFMYARPRAIHAFNMNKIISIFYAIVTPALNPFIYCLRNREVKEALKKLAYCQASRSD

SEQ ID NO: 557 - protein, 310 aa, Artificial Sequence
  OR6B3 consensus-c
MRGENVTKVSTFILLGFPTAPGLQYLLFLLFLLTYLFVLVENLAIILTVWSSTSLHRPMYYFLGSMSFLEIWYVSDIIPKMLEGFLLQRKRISFVGCMTQLYFFSSLVCTECVLLASMAYDRYVAICHPLRYHVIMTTGLCVQLVGFSFVSGFTISVIKVYFISSATFCGSNVLNHFFCDISPILKLACTDFSTAELVDFILAFIILVFPLLATVLSYGHITLAVLRIPSATGRWRAFSTCASHLTVVTIFYTALLFMYVRPQAIDSRSSNKLISVLYTVLTPILNPLIYCLRNKEFKNALKKALGLTSC

SEQ ID NO: 558 - protein, 312 aa, Artificial Sequence
  OR6C2 consensus-c
MKNHTVITTFILLGLTDDPQLQVLLFIFLFLTYMLSVTGNLTIITLTLVDHHLKTPMYFFLRNFSFLEVSFTTVCIPRFLYSISMGDNTITYNACASQIFFVILFGATEFFLLAAMSYDRYVAICKPLHYMVIMNNRVCTLLVLCCWVAGLMIIVPPLSLGLQLEFCDSNAIDHFSCDAGPLLKISCSDTWVIEQMVILMAVFALIITLVCVILSYLYIIRTILRFPSVQQRKKAFSTCSSHMIVVSIAYGSCIFIYIKPSAKDEVAINKGVSVLTTSVAPLLNPFIYTLRNKQVKQAFSDSIKRIAFLSKK

SEQ ID NO: 559 - protein, 311 aa, Artificial Sequence
  OR6C3 consensus-c
MNHTVITEFVLLGLSDDPDLQIVIFLFLFITYILSVTGNLTIITLTLVDSHLQTPMYFFLRNFSFLEISFTTVCIPRFLGAIITRDKTISYNNCAAQLFFFIFMGVTEFYILTAMSYDRYVAICKPLHYTTIMNRKLCTLLVLCAWLGGFLTIFPPLMLLLQLDYCASNVIDHFACDYFPLLQLSCSDTWLLEVIGFYFALVTLLFTLALVILSYMYIIRTILRIPSASQRKKAFSTCSSHMIVISISYGSCIFMYANPSAKEKASLTKGVAILNTSVAPMLNPFIYTLRNQQVKQAFKDVVHKVVFSSNK

SEQ ID NO: 560 - protein, 309 aa, Artificial Sequence
  OR6C4 consensus-c
MKNRTMFTEFILLGLTNQPELQVVIFIFLFLTYMLSVLGNLTIIILTLLDPHLQTPMYFFLRNFSFLEISFTSIFIPRFLTSMTTGNKVISFAGCLTQYFFAIFLGATEFYLLASMSYDRYVAICKPLHYLTIMSSRVCIQLVFCSWLGGFLAILPPIILMSQVDFCASNVLNHYYCDYGPLLELACSDTSLLELMVILLAVVTLVVTLVLVTLSYTYIIRTILRIPSAQQRTKAFSTCSSHMIVISLSYGSCMFMYINPSAKEGGAFNKGIAVLITSVTPLLNPFIYTLRNQQVKQAFKDTVKKIVKL

SEQ ID NO: 561 - protein, 314 aa, Artificial Sequence
  OR6C6 consensus-c
MKNQSMEIEFILLGLTDDPQLQIVIFLFLFLNYTLSLMGNLIIILLTLLDPRLKTPMYFFLRNFSFLEIIFTTVCIPRFLITIVTGDKTISYNNCAAQLFFFLLLGVTEFYLLAAMSYDRYVAICKPLHYPIIMNSKVCYQLVLSSWVTGFLIIFPPLVLGLKLDFCASKTIDHFMCDTSPILQISCTDTHVLELMSFTLAVVTLVVTLVLVILSYTCIIKTILKFPSAQQRTKAFSTCSSHMIVVSMTYGSCIFMYIKPSAKERVTLSKGVAVLYTSVAPLLNPFIYTLRNQQVKEAFWDVLQKNLCFSKRPF

SEQ ID NO: 562 - protein, 312 aa, Artificial Sequence
  OR6C65 consensus-c
MPNKTSIREFILLGLTDDPELQVVIFFFLLITYLLSVSGNMTIITLTLSNIHLKTPMYFFLRNFSFLEISFTTVCIPRFLISIATGDTTISYNACMAQVFFLILLGSTEFFLLAVMSYDRYVAICKPLHYTTIMNNKVCNQLVISSWLAGFLIIFPPVIMGLQLDFCDSNIIDHFTCDSSPMLLIACTDTQFLELMAFFLAVFTLMVTLALVILSYTLILRTILKIPSAQQRKKAFSTCSSHMIVVSISYGSCIFMYVKTSAKEGVALSKGVAVLNTSVAPMLNPFIYTLRNQQVKQALKDFTKKILSSNKQ

SEQ ID NO: 563 - protein, 312 aa, Artificial Sequence
  OR6C68 consensus-c
MRNHTAITTFILLGLTEDPQLQVLLFIFLFITYMLSVTGNLTIITLTLVDPHLKTPMYFFLQNFSFLEISFTTACVPRFLYSISTGDRTITYNACVIQLFFTDLFGVTEFFLLATMSYDRYVAICKPLHYMTIMSNKVCKTMVICCWMAALMIILPPLSLGFHLEFCDSNVIDHFGCDASPILKISCSDTWLIEQMVIACAVLTFIITLVCVVLSYIYIIRTILKFPSVQQRKKAFSTCSSHMIVVSITYGSCIFIYIKPSAKEEVNINKGVSVLISSISPMLNPFIYTLRNKQVKQAFHDSLKKIAFLLKK

SEQ ID NO: 564 - protein, 312 aa, Artificial Sequence
  OR6C70 consensus-c
MKNHTRQIEFILLGLTDNSQLQIVIFLFLLLNYVLSMIGNLTIIALTLLDSHLKTPMYFFLRNFSFLEISFTTACIPRFLITIVTREKTISYNGCISQLFFYIFLGVTEFFLLAAMSYDRYVAICKPLHYTSIMSSRVCHQLVLSSWVTGFLVIFPPLILGLNLDFCASNIIDHFICDISPVLQLSCSDTHLLELIAFLLAVMTLIVTLLLVILSYSYIIKTILKFPSAQQKKKAFSTCSSHMIVVSITYGSCIFIYIKPSANERVTLSKGVAVLNTSVAPLLNPFIYTLRNQQVKQAFRAVFRKIFSASDK

SEQ ID NO: 565 - protein, 312 aa, Artificial Sequence
  OR6C74 consensus-c
MRNHTTVTTFILLGLTDDPQLQVVIFLLLFFTYMLSVTGNLTIITLTLLDSHLKTPMYFFLRNFSFLEISFTTVCIPKFLVSMATGDKTISYNDCAAQLFFTILLGATEFFLLAAMSYDRYVAICKPLHYTTIMSSRVCNLLVFASWLAGFLIIFPPLLMGLQLDFCAANTVDHFFCDVSPILQLSCTDTDIIELMMLLSAILTLLVTLVLVILSYTNIIRTILKIPSSQQRKKAFSTCSSHMVVVSISYGSCIFMYVKPSAKERVSLNKGIALLSTSVAPMLNPFIYTLRNKQVKDAFKHMVKKIELFSMK

SEQ ID NO: 566 - protein, 312 aa, Artificial Sequence
  OR6C75 consensus-c
MRNSTAVTEFILLGLTSDPQWQVVLFIFLLVTYMLSVTGNLIIITLTLSDPHLQTPMYFFLRNFSFLEISFTSVCIPRFLVTIVTGDRTISYNGCVAQLFFFIFLGVTEFYLLAAMSYDRYVAICKPLHYTTIMSSRVCILLVFSSWLAGFLIIFPPIILLLQLDFCASNIIDHFICDSSPILQLSCTNTHFLELMAFFLAVVTLMVTLTLVILSYTYIIRTILRIPSMSQRKKAFSTCSSHMIVVSLSYGSCIFMYIKPSARERVTLSKGVAVLNTSVAPLLNPFIYTLRNQQVKQAFKNMVQRMIFSSNK

SEQ ID NO: 567 - protein, 311 aa, Artificial Sequence
  OR6C76 consensus-c
MKNRTSVTDFILLGLTDDPELQVVIFSFLFLTYVLSVTGNLTIITLTLLDSHLKTPMYFFLRNFSFLEISFTSVCNPRFLVSILTGDKSISYNACAAQLFFFILLGSTEFFLLASMSYDRYVAICKPLHYTTIMSDKICYQLVISSWLAGFLVIFPPLAMGLQLDFCDSNIIDHFTCDSAPLLQISCTDTSTLELMSFILAVFTLMSTLILVILSYTYILRTILRIPSAQQRKKAFSTCSSHMIVVSISYGSCIFMYVKTSAKEGVALTKGVAILNTSVAPMLNPFIYTLRNQQVKQAFKDVVRKISHKKK

SEQ ID NO: 568 - protein, 315 aa, Artificial Sequence
  OR6K3 consensus-c
MESGNQSTVTEFIFTGFPQLQDGSLLYFIPLLFIYTFIVIGNLLIFFAVRLDTRLHNPMYNFISIFSFLEIWYTTATIPKMLSNLISEKKTISMTGCLLQMYFFHSLGNSEGILLTTMAIDRYVAICNPLRYPTIMTPRLCAQLSAGSCIFGFLILLPEIVWISTLPFCGPNQIHQIFCDFEPVLSLACTDTSMILVEDVIHAVAIIISVLIIALSYIRIITVILRIPSSEGRQKAFSTCAAHLMVFLIFFGSVSLMYLRFSATFPPVLDTAIALMFAVLAPFFNPIIYSLRNKDMKNAIKKLLCLQKVLNKSGG

SEQ ID NO: 569 - protein, 319 aa, Artificial Sequence
  OR6K6 consensus-c
MTQLMASGNQTMVTEFLFSMFPHLHEGGLLFFIPLLLIYGFIITGNLIIFIVIQLDMALHTPMYFFISVLSFLEIWYTTTTIPKMLSCLVSEQKTISLAGCLLQMYFFHSLGITEGCVLTAMAIDRYIAICNPLRYPTIMTPKLCIQLTAGSCLCGFLLVLPEIAWIATLPFCGSNQIHQIFCDFTPVLSLACTDTSLVVIVDAIHAVEILASFLVIALSYIRIIIVILGMPSAEGRHKAFSTCAAHLAVFLLFFGSVAVMYLRFSATYSVFWDTAIAVTFVILAPFLNPIIYSLRNKDMKDAIGRLFHYQKRAGWAGK

SEQ ID NO: 570 - protein, 317 aa, Artificial Sequence
  OR6N2 consensus-c
MEQHNHSSLAEFVLLGFPSVGHVRGWLFVLLLLAYLFTICGNMLIFLVIRLDAALHTPMYHFVSVLSFLELWYTATTIPKMLANLLSEKKTISFAGCLLQTYFFHSLGASECYLLTAMAYDRYLAICRPLHYPAIMTTTLCAKMAAGCWTCGFLCPISEVILVSQLPFCGYNEIQHIFCDFPPLLSLACKDTSTNVLVDFAINAFIILITFLFIMVSYGRIIGAVLKIKTAAGRKKAFSTCASHLAVVLIFFGSIIFMYVRLKKSYSLTLDRTLAVVYSVLTPLVNPIIYSLRNKELIKAIKRTIFQKGDKASPTHH

SEQ ID NO: 571 - protein, 311 aa, Artificial Sequence
  OR8S1 consensus-c
MALRNHSTITEFILLGLSADPNIQALLFVLFLGIYLLTIMGNLMMLLVIRADSHLHTPMYFFLSHLSFLDLCFSSVTVPKMLENLLSQRKTISVEGCLAQVFFVFVTAGTEACLLSVMAYDRYAAICHPLLYGQIMGKQLCMHLVWGSWGLGFLDALINILLAVNLDFCEAKIIHHYSCELPSLLPLSCSDVSRNLIALLCSTLLHGLGTFLLIFFSYTRIISTILSISSTSGRSKAFSTCSSHLTAVTFFYGSGLLRYLMPNSGSPIELIFSVQYSVVTPMLNPLIYSLKNKEVKAALRRTLEKYLQHIR

SEQ ID NO: 572 - protein, 314 aa, Artificial Sequence
  OR9A2 consensus-c
MMDNHSSATEFHLLGFPGSQGLHHILFAIFFFFYLVTLMGNTVIIVIVCVDKRLQSPMYFFLGHLSALEILVTTIIVPMMLWGLLLPGMQTVSLSLCIAQLFLYLAVGTTEFALLGVMAVDRYVAVCNPLRYNIIMNSSTCIWVVIVSWVFGFLSEIWPVYATFQFTFCKSNSLDHFYCDRGQLLKLSCDNTLFTEFILFLMAVFILIGSLIPTIVSYTYIISTILKIPSASGRRKAFSTCASHFTCVVIGYGSCLFLYVKPKQTQGVEYNKIVSLLVSVLTPFLNPFIFTLRNDKVKEALRDGVKRCCQLLKD

SEQ ID NO: 573 - protein, 314 aa, Artificial Sequence
  OR9A4 consensus-c
MLMNYSSATEFYLLGFPGSEELHHILFAIFFFFYSVTLMGNTVIIVIVCVDKRLQSPMYFFLGHLSALEILVTTIIVPVMLWGLLLPGMQTISLAACVVQLFLYLALGTTEFALLGAMAVDRYVAVCNPLRYNIIMNSHTCIWVVIVSWVFGFLFEIWPVYATFQLTFCKSNVLDHFFCDRGQLLKLSCNDTLFTEFILFLMAVFILFGSLIPTIVSYTYIISTILKIPSASGRRKAFSTCASHFTFVVIGYGSCLFLYVKPKQTQAAEYNRVVSLMVSVVTPFLNPFIFTLRNDKVIEALRDGVKRCCQLFKN

SEQ ID NO: 574 - protein, 314 aa, Artificial Sequence
  OR10A3 consensus-c
MKRQNQSSVVEFILLGFSNFPELQEQLFGVFLVIYLVTLMGNAIIIVVISLNQSLHVPMYLFLQNLSVVEVSFSAVIMPEMLVVLSTEKTTISFVGCFAQMYFILLFGGTECFLLGAMAYDRFAAICHPLSYPVIMNKRVFMKLVMFSWVSGIMVATVQTTWVFSFPFCGPNEINHLFCETPPVLELACADTFLFEIYAFTGTILIVMVPFLLILLSYIRILFAILKMPSTTGRQKAFSTCASHLTSVTLFYGTASMTYLQPKSGYSPETKKLMSLAYSLLTPLLNPLIYSLRNSEMKRALMKLWRRKVILHTF

SEQ ID NO: 575 - protein, 316 aa, Artificial Sequence
  OR10A7 consensus-c
MICENHTRVTEFILLGFTNNPEMQVSLFILFLAIYTVTLLGNFLIVTVTSVDPALQTPMYFFLRNLSLLEVCFTLVMVPKMLVDLVSPRKIISFVGCGTQMYFFFFFGSSECFLLSMMAYDRFVAICNPLRYSVIMNRSLCLWMAIGSWMSGVPVSMLQTAWMMALPFCGPNAVDHFFCDGPPVLKLVTVDTTMYEMQALASTLLFIMFPFSLILVSYTRIIITILRMPSATGRQKAFSTCSSHLIVVSLFYGTASLTYLRPKSNQSPESKKLVSLSYTVITPMLNPIIYSLRNNEVKGAVKRTITRKVLQKLDVF

SEQ ID NO: 576 - protein, 311 aa, Artificial Sequence
  OR10G6 consensus-c
MQSGNQTSVSHFILVGLHHPPQLGVPLFLAFLVIYLLTVSGNGLIILTVLVDIRLHRPMYWFLCHLSFLDMTISSAIVPKMLAGFLLDSRVISFGGCVIQLFSFHFLGCTECFLYTLMAYDRFLAICKPLHYATIMTRKVCNSLALGTWLGGTLHSLFQTSFMFRLPFCGPNRVDYFFCDIPAMLRLACADTTINELVTFVDIGFLALTCFVLILTSYGYIVAAILRIRSADGRRNAFSTCAAHLTVVIVYYVPCTFIYLRPGSQEPLDGVVAVFYTVITPLLNPIIYTLRNKEMKAALQRLGGHKEVQPH

SEQ ID NO: 577 - protein, 310 aa, Artificial Sequence
  OR10G9 consensus-c
MSNTSLVTTFILTGLPHAPALDAPLFGIFLVIYVLTVLGNLLILLVIRVDSHLHTPMYYFLTNLSFIDMWFSTVTVPKMLMTLVSPGGRAISFHSCVAQLYSFHFLGSTECFLYTVMSYDRYLAISYPLRYTSMMSGRTCALLATSTWLSGSLHSAVQTTLTFRLPYCGPNQIQHYFCDAPPILKLACADTSANEMVIFVNIGVVASGCFLLIVLSYVSIVCSILKIRTSEGRHRAFQTCASHCIVVLCFFVPCVFIYLRPGSRDAVDGVVAVFYTVLTPLLNPVVYTLRNKEVKKALLKLKDKVAHSQG

SEQ ID NO: 578 - protein, 315 aa, Artificial Sequence
  OR10H1 consensus-c
MQGANHSTVTEFILIGFSTFPHLQLMFFLLFLLMYLFTLLGNLLIMATIWSERSLHTPMYLFLCALSISEILYTFAIIPRMLADLLSTQRSIAFLACASQMFFSFTFGFTHSFLLTVMGYDRYVAICHPLRYNVLMSPRGCACLVAWSWAGGSVMGLVVTSAIFHLTFCGPNEIHHFACHVPPLLKLACGDDVLVVAKGVGLVCITALLGCFLLILLSYAFIVAAILKIPSAEGRHKAFSTCASHLTVVVVHYGFASVIYLKPKGPQSLEGDTLMGITYTVLTPFLSPIIFSLRNKELKVAMKKTFLSKLYPEKN

SEQ ID NO: 579 - protein, 316 aa, Artificial Sequence
  OR10H2 consensus-c
MLGLNHTSVSEFILVGFSTFPHLLLPMFFLLFLLMYLFTLLGNLLIMATVWSERSLHTPMYLFLCALSISEILYTVAIIPRMLADLLSTHRSIAFLACASQMFFSFTFGFTHSFLLTVMGYDRYVAICHPLRYNVLMSPRGCACLVAWSWAGGSVMGLVVTTAIFHLTFCGPNEIHHFLCHVPPLLKLACGNNVPAVALGVGLVCITALLGCFLLILLSYAFIVAAILKIPSAEGRHKAFSTCASHLIVVIVHYGFASVIYLKPKGPHSQEGDTLMAITYTVLTPFLSPIIFSLRNKELKVAMKKTFLSKLYSSGT

SEQ ID NO: 580 - protein, 316 aa, Artificial Sequence
  OR10H3 consensus-c
MPGQNYSTVSEFILSGFSNFPQHLLPVFFLLYLLMYLFTLLGNLLIMATIWSERSLHTPMYLFLCALSISEILFTVAVTPRMLVDMLSTHRSITFVACASQMFFSFTFGFTHSFLLMIMGYDRYVAICHPLRYNVLMSTRGCARLVSWTWAGGSVMGMMVTLIVFHLTFCGSNVIHHFLCHVLSLLKLACGKETSSVTLGVILVCVTALMGCLFLIVLSYVFIVAAILRIPSAEGRHKTFSTCVSHLTVVIVHYGFASIIYLKPKGPHSMDSNTLMATTYTVFTPFLSPIIFSLRNKELKNAIKKSFCRKFSPLSS

SEQ ID NO: 581 - protein, 316 aa, Artificial Sequence
  OR10H4 consensus-c
MPSQNYSIVSEFILFGFSAFPQHLLPIFFLLYLLMYLFTLLGNLLIMATIWIEHSLHTPMYLFLCALSISEILFTVAITPRMLVDMLSTHHSITFVACASQMFFSFTFGFTHSFLLMIMGYDRYVAICHPLRYNVLMSTRDCARLVSWTWAGGSVMGMMVTLIVFHLTFCGSNVIHHFFCHVLSLLKLACGKETSSVTLGVILVCVTALMGCLFLIILSYVFIVAAILRIPSAEGRHKTFSTCVSHLTVVVVHYGFASIIYLKPKGPHSMDSNTLMATTYTVFTPFLSPIIFSLRNKELKNAIKKSFYRKFCPLSS

SEQ ID NO: 582 - protein, 315 aa, Artificial Sequence
  OR10H5 consensus-c
MLGLNHTSVSEFILVGFSAFPHLQLMLFLLFLLMYLFTLLGNLLIMATIWSERSLHTPMYLFLCALSISEILYTVAIIPRMLADLLSTQRSIAFLACASQMFFSFTFGFTHSFLLTVMGYDRYVAICHPLRYNVLMSPRGCACLVGCSWAGGSVMGMVVTTAIFHLTFCGPNEIHHFFCHVPPLLKLACGDDVLVVAKGVGLVCITALLGCFLLILLSYAFIVAAILKIPSAEGRNKAFSTCASHLTVVVVHYGFASVIYLKPKGPQSLEGDTLMGITYTVLTPFLSPIIFSLRNKELKVAMKKTFFTKLFPQNC

SEQ ID NO: 583 - protein, 312 aa, Artificial Sequence
  OR10P1 consensus-c
MAGENQTLPEFLLLGFSDLRALQGPLFWVVLLVYLVTLLGNSLIILLTQASPALHSPMYFFLRHLSVVELLYTTDIVPRTLADLASPHPQAISFQGCAAQMYVFIVLGISECCLLTAMAYDRYAAICRPLHYSTLMSPRACMAMVGTSWLMGIITATTHSSLIFTLPFPSHPIIPHFLCDILPVLRLASAGKHRSEISVMTATVVFIMVPFSLIVTSYARILGAILAMASTQSRRKVFSTCSSHLLVVSLFFGTASITYIRPQAGSSVTTDRILSLFYTVITPMLNPIIYTLRNKEVRGALRHMVKRQVPSP

SEQ ID NO: 584 - protein, 322 aa, Artificial Sequence
  OR10S1 consensus-c
MTMTTENPNQTVVSHFFLEGLMYTAEHPSLFFLLFLLIYSITVTGNLLILLTVGSDPHLSSPMYHFLGHLSFLDACLSTVTVPKVMAGLLTLDGKVISFEGCAVQLYCFHFLASTECFLYTVMAYDRYLAICQPLHYPVAMNRRMCAGLAGITWAIGAVHSAIHTSLTFRLLYCGPCHIAYFFCDIPPVLKLACADTTINELVMLANIGIVAAGCLILIVISYVFIVAAVLRIRTAQGRQRAFSTCTAHLTVVLLYYVPPVCIYLQPRSSGAGAGAPAVFYTIVTPMLNPFIYTLRNKEVKRALRRLLCSGSRESPAGSPPP

SEQ ID NO: 585 - protein, 307 aa, Artificial Sequence
  OR10V1 consensus-c
MEGINKTKIQFFFRPFSPDPEVQMLIFVAFLMMYLTSLSGNATIALIVQINHSLHTPMYFFLANLAVLEIFYSSSIAPLALANLLSMGKTPVSITGCGTQMFFFVFLGGADCILLAVMAYDRFVAICHPLRYTLIMSWSLCVELLVGSLVLGFLLSLPLTILIFHLPFCHNDEIYHFYCDMPAVMRLACADTRVHETALYIVSFIVLSIPLSLISISYVFIVAAILRIRSAEGRHRAFSTCSSHLTVVLLQYGCTSFIYLSPSSSYSPEMGRVVSVVYTFITPILNPLIYSMRNKELKDALRALRKF

SEQ ID NO: 586 - protein, 314 aa, Artificial Sequence
  OR10W1 consensus-c
MTWGNHSVLMEFVFLAYPSCPELRILSFLGVSLVYGLIITGNVLIVVAIQTEARLHTPMYYFLGSLSGVEICYTAVVVPHILANTLQSEKTITLLGCATQMAFFIGLGSADCFLLAAMAYDRYVAICHPLQYPLIMTLTLCVRLVVASVVIGLFLSLQLVAFIFSLPFCQARGIEHFFCDVPPVMHLVCAQSHIHEQSVLVAATLAIAVPFFLIATSYAFIVAAVLKIHSAAGRHRAFSTCSSHLTVVLLQYGCCAFMYLRPSSSYNPKQDQFISLVYTLGTPLLNPLIYTLRNSEMKGAIGRVLTRNCLSQNS

SEQ ID NO: 587 - protein, 317 aa, Artificial Sequence
  OR10AD1 consensus-c
MDLRNSSTVTEFILVGFEQSSPSTRALLFALFLALYSLAMAMNGLIIFITWTDPRLNSPMYFFLGHLSFLDVCFITTTIPQMLIHLVVKNHTVSFVSCMTQMYLVFCVGVAECILLAFMAYDRYVAICHPLSYAQIMSQQVCVRLVSTAWFFGLINGIFLEYMSFREPFCRDNHIENFFCEAPIVIALSCGDPQFSLKAIFADAIVVLLSPMVLIVISYARILASILGRASSSGRGKTFSTCASHLTVVIFFYTSAMFSYMNPRSTHGPDKDKPFSLLYTIITPMCNPIIYSFRNKEMKGAMVRALGRTSLAQAESV

SEQ ID NO: 588 - protein, 316 aa, Artificial Sequence
  OR10AG1 consensus-c
MENQLKTEESNLTTLMEFVLLGFSDIPNLQWMLFGIFLLIYLTILMCNSIIILITRIDPALQTPMYFFLSNFSFLEICYVTVTIPRMLMDLWTQKGNISLFACATQMCFVLMLGGTECLLLTVMAYDRYVAICNPLHYPLVMNHKVCIQLVIASWISGIPVVIGQTCQIFSLPFCGSNTINHFFCDIPPILKLACGDTFVNEITVYVVAVVFVMVPFLLIVVSYGKIISNILKLSSARGRAKAFSTCSSHLIVVVLFYGTATITYLQPKPNQSEGMGKLLSLFYTILTPTLNPIIYTLRNKDIMVALRKLLAKLLT

SEQ ID NO: 589 - protein, 309 aa, Artificial Sequence
  OR11A1 consensus-c
MEIVSTGNQTITEFVLLGFYDIPELHFLFFIVFTVVYVFIIIGNMLIIVAVVSSQRLHTPMYFFLANLSFLEILYTSTVVPKMLEGFLQEATISVAGCLLQFFIFGSLATAECLLLAVMAYDRYLAICYPLHYPLLMGPRRCLGLVVTTWLSGFVVDGLVVALMAQLRFCGPNHIDHFYCDFMPLVGLACSDPSVAQVTTFILSVFCLTVPFGLILTSYARIVVAVLRVPAGASRRKAFSTCSSHLAVVSTFYGTLMILYVAPSAVHSQLLSKVFSLLYTVVTPLFNPVIYTLRNKEVHQALRKILCIK

SEQ ID NO: 590 - protein, 315 aa, Artificial Sequence
  OR11H2 consensus-d
MNVSEPNSSFAFVREFILLGFSCEWKIQILLFSLFTTTYALTITGNGAIVCALWCDQRLHTPMYIFLGNFSFLEIWYVSSTVPKMLVNFLSEKKTISFAGCFLQFYFFFSLGTSECFLLAVMAFDRYLAICRPLHYPNIMTGHLCTKLVIICWVCGFLWFLIPIVLISQMPFCGPNIIDHVVCDPGPLFALACVSAPRTQLLCYTLSSLVIFGNFLFILGSYTLVLLAVLRMPSATGRHKAFSTCGSHLAVVSLFYGSLMVMYVSPGLGHSAGMQKVATLFYAMVTPLFNPLIYSLRNKEIKAALRKVLGSSNII

SEQ ID NO: 591 - protein, 308 aa, Artificial Sequence
  OR12D2 consensus-c
MLNQTSVTEFLLLGVTDIQELQPFLFVVFLTIYFVNVAGNGAILMIVISDPRLHSPMYFFLGNLSCLDICYSTVTLPKMLENFLSTHKAISFLGCISQLHFFHFLGSTEAMLLAVMAFDRFVAICKPLHYTVIMNHQLCTQMAVTIWVIGFFHALLHSVMTSRLNFCGSNHIHHFFCDVKPLLELACGNTELNQWLLNTVTGTIAMGPFFLTLLSYFYIITYLFFKTHSCSMLHKALSTCASHFMVVILFYAPVLFTYIRPASGSSMDQDRIIAIMYSVVTPVLNPLIYTLRNKEVKGALGRVIRRLL

SEQ ID NO: 592 - protein, 315 aa, Artificial Sequence
  OR12D3 consensus-c
MENVTTVNEFLLLGLTSVQELQPFFFVIFLIIYLINLIGNGAILVIVILEPQLHSPMYFFLGNLSCLDICYSSVTLPKLLVNLLSTRRAISFLGCITQLHFFHFLGSTEAILLAIMAFDRFVAICNPLRYTVIMNPQVCILLAAVAWLTSFFYALMHSVMTARLNFCHSQKLNHFFCDVKPLLELACGDTLLNQWLLSIVTGSISMGAFFLTLLSYFYIIGFLLFKNRSCRILHKALSTCASHFMVVCLFYGPVGFTYIRPASATSMIQDRIVAIIYSAVTPVLNPLIYTLRNKEVMLALKKIFGRKLFKDWQQH

SEQ ID NO: 593 - protein, 308 aa, Artificial Sequence
  OR13A1 consensus-c
MSNQTLVTEFILQGFSEHPEYRVLLFSCFLSLYSVALTGNVLIILAITFNPGLHTPMYFFLFNLATMDIICTSSIMPKALAGLVSEENSISYGGCMAQLYFLTWSASSELLLLTVMAYDRYAAICHPLHYSTMMSKVFCSGLATGVWLLCAFNTAIHTGLMLRLDFCGPNVITHFFCEVPPLLLLSCSSTYVNSIMIVLADAFYGILNFLMTIVSYGFIISSILKMRTAEGKQKAFSTCSSHLIVVCMYYTAVFYAYISPVSSYSAEKSKLAGVLYTMLSPTLNPLIYTLRNKEVKAALRKLFPFFRN

SEQ ID NO: 594 - protein, 318 aa, Artificial Sequence
  OR13C2 consensus-c
MEWENQTILVEFFLKGLSGYPRLELLFFVLILIMYVVILLGNGTLILISILDSHLHTPMYFFLGNLSFLDICYTTTSIPSTLVSFLSERKTISFSGCAVQMFLGLAMGTTECVLLGMMAFDRYVAICNPLRYPVIMSKDSYVPMAAGSWIIGVVNSAVQTVFVVQLPFCRNNVINHFSCEILAVMKLACADISGNEFIMLVATTLFILTPLLLIIISYTLIIVSILKIRSSEGRSKVFSTCSAHLTVVIIFYGTILFMYMKPKSKETLNSDDLDATDKLISMFYGVMTPMMNPLIYSLRNKDVKEAVKHLLRRRFFNK

SEQ ID NO: 595 - protein, 317 aa, Artificial Sequence
  OR13C3 consensus-c
MDKINQTFVSEFLLLGLSGYPKIEIIYFALILVMYLVILIGNGVLIIASIFDSRLHTPMYFFLGNLSFLDICYTSSSVPSTLVSLISKKRNISFSGCAVQMFFGFAMGSTECLLLGMMAFDRYVAICNPLRYPIIMSKVVYVLMASVSWLSGGINSAVQTSLAMRLPFCGNNIINHFTCEILAVLKLACADISLNIITMVISNMAFLVLPLLVIFFSYMFILYTILRMNSATGRRKAFSTCSAHLTVVIIFYGTIFFMYAKPKSQDLIGEDKLQTSDKLISLFYGVVTPMLNPIIYSLRNKDVKAAVKYLLNKKPIQ

SEQ ID NO: 596 - protein, 318 aa, Artificial Sequence
  OR13C4 consensus-c
MDKINQTFVREFILLGLSGYPKLEIIFFALILVMYLVILIGNGVLIIASIFDSRLHTPMYFFLGNLSFLDICYTSSSVPSTLVSLISKKRNISFSGCAVQMFFGFAMGSTECFLLGMMAFDRYVAICNPLRYPIIMSKVVYVLMASVSWLSGGINSIVQTSLAMRLPFCGNNIINHFLCEILAVLKLACADISLNIVTLAVSNMAFLVLPLLVIFFSYMFILYTILRMNSATGRRKAFSTCSAHLTVVIIFYGTIFFMYAKPKSQDLLGKDNLQATEGLVSMFYGVVTPMLNPIIYSLRNKDVKAAVKYLLSRKAVNQ

SEQ ID NO: 597 - protein, 318 aa, Artificial Sequence
  OR13C9 consensus-c
MEWENQTILVEFFLKGLSGYPRLELLFFVLILIMYVVILLGNGTLILISILDSHLHTPMYFFLGNLSFLDICYTTTSIPSTLVSFLSERKTISFSGCAVQMFLGLAMGTTECVLLGMMAFDRYVAICNPLRYPIIMSKNSYVPMAAGSWFAGVVNSAVQTTFVVQLPFCRNNVINHFSCEILAVMKLACADISGNEFIMLVATTLFTLMPLLLIVISYSLIISSILKIRSSEGRSKAFSTCSAHLTVVIIFYGTILFMYMKPKSKETLNSDDLDATDKLISMFYGVMTPMMNPLIYSLRNKDVKEAVKHLLNRRFFSK

SEQ ID NO: 598 - protein, 319 aa, Artificial Sequence
  OR13F1 consensus-c
MFPANWTSVKVFFFLGFSHYPKVEVIIFVLCLLMYLITLLGNIILISITILDSHLHTPMYFFLSNLSFLDIWYTSSALTPMLANFVSGKNTISFSGCATQMYFSLAMGSTECVLLSMMAYDRYVAICNPLRYPIIMNKRVCVQIAAGSWVTGCLTALVETVSVLQLSLCGNSIINHFTCEILAVLKLVCVDTSLVQLIMLVISVLLLPMPMLLICISYAFILSNILRISSVDGRSKAFSTCAAHLTVVVLFYGTALSMYLKPSAVDSQEIDKFMALVYAGLTPMLNPIIYSLRNKEVKVAVKKLLIRNPFNTALISILK

SEQ ID NO: 599 - protein, 313 aa, Artificial Sequence
  OR51A2 consensus-d
MSIINTSYVEITTFFLVGMPGLEYAHIWISIPICSMYLIAILGNCTILFIIKTEPSLHEPMYYFLSMLAMSDLGLSLSSLPTMLRIFLFNAPEISANACFAQEFFIHGFTALESSVLLIMSFDRFLAIHNPLRYSSILTTVRVAQIGIVFSFKSMLLVLPFPFTLRSLKYCKKSQLSHSYCLHQDVMKLACSDNRIDVIYGFFGALCLMVDFMLIAVSYILILKTVLGIASQKEQLKALNTCVSHICAVIIFYLPIINLAIVHRFAGHVSPLFNVLMANVLLLVPPLMNPIVYCVKTRQIRVRVVAKLCQKQI

SEQ ID NO: 600 - protein, 313 aa, Artificial Sequence
  OR51A4 consensus-c
MSIINTSYVEITTFFLVGMPGLEYAHIWISIPICSMYLIAILGNCTILFIIKTEPSLHEPMYYFLSMLAMSDLGLSLSSLPTMLRIFLFNAPEISANACFAQEFFIHGFTALESSVLLIMSFDRFLAIHNPLRYSSILTTVRVAQIGIVFSFKSMLLVLPFPFTLRSLKYCKKSQLSHSYCLHQDVMKLACSDNRIDVIYGFFGALCLMVDFMLIAVSYILILKTVLGIASQKEQLKALNTCVSHICAVIIFYLPIINLAIVHRFARHVSPLFNVLMANVLLLVPPLMNPIVYCVKTRQIRVRVVAKLCQKQI

SEQ ID NO: 601 - protein, 309 aa, Artificial Sequence
  OR51A7 consensus-c
MSVLNNSEVKLFLLIGIPGLEHAHIWISIPICLMYLVAILGNCTILFVIKTEPSLHEPMYYFLAMLAVSDLGLSFSSLPTMLRIFLFNAMGISPNACFAQEFFIHGFTVMESSVLLIMSLDRFLAIHNPLRYSSILTSNRVAKMGLILAIRSILLVLPFPFTLKRLKYCQKNLLSHSYCLHQDVMKLACSDNKVNFIYGFFVALCTMLDLALIVLSYVLILKTVLSIASLAERLKALNTCVSHICAVLIFYVPIITLAAMHRFAKHKSPLVVILIADMFLLVPPLMNPIVYCVKTRQIREKVLGKLCGR

SEQ ID NO: 602 - protein, 311 aa, Artificial Sequence
  OR51B2 consensus-c
MWPNISAAPFLLTGFPGLEAAHHWISIPFFAVYVSVLLGNGTLLYLIKDDHSLHEPMYYFLAMLAGTDLMVTLTTMPTVMGVLWVNHREISHGACFLQAYFIHSLSIVESGVLLAMAYDRFIAIRNPLRYASILTNTRVIKLGLGVFMRGFVSILPPILRLFSFPYCKSHVLSHAFCLHQDVMKLACADITFNRLYPVILVSLTFFLDCLIILFSYILILKTVMGIASGEERAKALNTCVSHISCVLVFYITVIGLTFIHRFGKHVPHVVHITMSYVYFLFPPLMNPIIYSIKTKQIQYSIIRLFSKHRFS

SEQ ID NO: 603 - protein, 311 aa, Artificial Sequence
  OR51B4 consensus-c
MWSNNSAAPFLLTGFLGSEAIHHWISIPFFVIYLSILFGNGTLLFLIWNDHSLHEPMYYFLAMLAGTDLGMTLTTMPTVLGVLLLDQREIAQGACFTQSYFIHSLAIVESGVLLAMAYDRFIAIRTPLRYNSILTNSRVMKIGLGVLMRGFVSIVPPILPLYWFPYCRSHVLSHAFCLHQDVMKLACADITFNRIYPVILVALTFFLDALIIIFSYILILKTVMGIASGEERAKALNTCVSHISCVLVFYITVIGLTFIHRFGKHAPHVVHITMSYVYFLFPPFMNPIIYSIKTKQIQRSIIRLFSGHSRA

SEQ ID NO: 604 - protein, 312 aa, Artificial Sequence
  OR51B5 consensus-c
MWPNSSSHSFLLTGFPGLEAAHHWISVPFFFVYISVLFGNGTLLLLIKEDHNLHEPMYYFLAMLAATDLGLTLTTMPTVLGVLWLDHREIGSAACFSQAYFIHSLSFVESGVLLAMAYDRFIAICNPLRYTSILTNTRVVKIGLGVLMRGFVSVVPPIRPLYFFPYCHSHVLSHAFCLHQDVIKLACADTTFNRLYPVVLVVLIFVLDSLIILISYVLILKSVLSIASREERAKALNTCVSHICCVLVFYVTVIGLSLIHRFGKQVPHIVHLIMSYVYFLFPPLMNPIIYSVKTKQIQNGILHLFTTHRIGT

SEQ ID NO: 605 - protein, 312 aa, Artificial Sequence
  OR51B6 consensus-c
MWLNTSASPFLLTGFPGMEKAHHWISIPLLVVYISILLGNGTLLFLIRDDHNLHEPMYYFLAMLAATDLGVTLTTMPTVLGVLWLNHREIGHGACFSQAYFIHTLSIVESGVLLAMAYDRFIAIRNPLRYTSILTNTQVMKIGVGVLTRAGLSIMPIIIRLHWFPYCRSHVLSHAFCLHQDVIKLACADITFNRLYPVVVVFAMVLLDFLIIFFSYILILKTVMGIASGEERAKALNTCVSHICCILVFYVTVVGLTFIHRFGKHVPHVVHITMSYIYFLFPPFMNPVIYSIKTKQIQSGILRLFSLPHSRA

SEQ ID NO: 606 - protein, 324 aa, Artificial Sequence
  OR51D1 consensus-c
MQKPQLLVPVMATPNGTLVHPAYFLLVGIPGLGPNIHFWLAFPLCFMYALATLGNLAIVLIIRVERRLHEPMYLFLAMLSTIDLVLSSVTMPKMASLFLTGIQEIEFNICLAQMFLIHALSAMESAVLLAMAFDRFVAICHPLRHASVLTGPTVAKIGLAALTRGFVFFFPLPFILKRLSYCQTHTVTHSFCLHQDIMKLSCTDTTVNVVYGLFIILSVMGVDSLFIGFSYILILRAVLELSSRGAALKAFNTCISHLCAVLVFYVPLIGLSVVHRLGGPTSLLHVVMANIYLLLPPVVNPIVYGAKTKEIRSRVLHMFSQGGR

SEQ ID NO: 607 - protein, 320 aa, Artificial Sequence
  OR51E2 consensus-c
MSSCNFTHATFVLIGIPGLEKAHFWVGFPLLSMYVVAVFGNCIVVFIVRTERSLHAPMYLFLCMLAAIDLALSTSTMPKILALFWFDSREISFDACLTQMFFIHALSAIESTILLAMAFDRYVAICHPLRHAAVLNNTVTAQIGIVAVVRGSLFFFPLPLLIKRLAFCHSNVLSHSYCVHQDVMKLAYADTLPNVVYGLTAILLVMGVDVLFISLSYFLIIRTVLQLPSKSERAKAFGTCVSHIGVVLAFYVPLIGLSVVHRFGNSLHPIVHVLMGDVYLLLPPVINPIIYGAKTKQIRTRVLAMFKISCDKDLQAVGGK

SEQ ID NO: 608 - protein, 319 aa, Artificial Sequence
  OR51F1 consensus-c
MLQNQDNMEILSNLTSKFPTFLLTGIPGLESAHAWISIPFCCLYAIALSGNSMILFVIITQQSLHEPMYYFLSMLSATDLGLTVSTMSTTLGILWFDAREISLDSCIVQMFFLHGFTFMESGVLVAMAFDRYVAICDPLRYTTILTNSRIIQMGLLMITRTVVLIVPLLLLLKPLSFCRMNALSHSYCYHPDVIKLACSDTRANSICGLIDLILTTGIDTPCIVLSYILIIRSVLRIASPEERHKVFSTCVSHIGAVAIFYIPMLSLSLVHRYGRSAPKVVHSMMANVYLLLPPVLNPIIYSVKTKQIRKAILSLLLTK

SEQ ID NO: 609 - protein, 316 aa, Artificial Sequence
  OR51F2 consensus-c
MSVLNNTIAQPLIFLLTGIPGLKATQYWISIPFCLLYVIALSGNSMILFVVLCERSLHEPMYYFLSMLSATDLSLSLCTLSTTLGVFWFEAREINLNACIAQMFFLHGFTFMESGVLLAMAFDRFVAICDPLRYTTILTNARIAQIGMSMLIRNVAVMLPVVLFVKRLSFCSSMVLSHSYCYHVDLIQLSCTDNRINSILGLFALFSTTGFDCPCILLSYVLIIRSVLSIASSEERRKAFNTCISHISAVAIFYIPLISLSLVHRYGHSAPPFVHTIMANVFLLIPPVLNPIIYSVKTKQIRKAIIKVLIQKHSKS

SEQ ID NO: 610 - protein, 319 aa, Artificial Sequence
  OR51G1 consensus-c
MTILYNSSLQKATFFLTGFQGLEDLHGWISIPFCSIYLTVILGNLTILHVIRTDATLHEPMYYFLAMLALTDLGLCLSTLPTVLGIFWFDAREIGIPACFTQLFFIHTLSLVESSVLLSMSIDRYVAICNPLRYSTVLTPARIVKMGLSSVLRSALLILPLPFLLKRFQYCRSHVLAHAYCLHLEIMKLACSSIIVNHIYGLFVVACTVGVDSLLIFLSYALILRTVLSIASRQERLRALNTCVSHICAVLLFYIPMIGLSLVHRFGEHLPRIVHLLMSYVYLLVPPLMNPIVYSIKTKQIRQRIIKKFEFIKSLRCFW

SEQ ID NO: 611 - protein, 311 aa, Artificial Sequence
  OR51G2 consensus-c
MTLGSGNSSSSATFLLSGIPGLEHMHIWISIPLCFMYLVSILGNCTILFIIKTEPSLHEPMYLFLSMLALTDLGLSLCTLPTVLGIFWVGAREISHDACFAQLFFIHCLSFLESSVLLSMAFDRFVAICHPLHYASILTNTVIGRIGLVSLGRSVALIFPLPFMLKRFPYCGSPVLSHSYCLHQEVMKLACADIKANSIYGMFVIVSTVGIDSLLILFSYALILRTVLSIASRAERLKALNTCVSHICAVLLFYTPMIGLSVIHRFGKQAPHLVQVVMGFVYLLFPPLMNPIVYSVKTKQIRDRVTHAFCY

SEQ ID NO: 612 - protein, 314 aa, Artificial Sequence
  OR51I1 consensus-c
MLGLNGTPFQPATLQLTGIPGMQTGQAWVALIFCILYLISIVGNLSILTLVFWEPALHQPMYYFLSMLSLNDLGVSLSTLPTVLATFCFNYRHVGFDACLVQMFFIHTFSFMESGILLAMSFDRFVAICDPLRYATVLTNNRILAMGLGILTKSFTTLFPFPFLVKRLPFCKGNVLHHSYCLHPDLMKVACGDIHVNNIYGLFVVIFTYGMDSTFILLSYALILRAVLAIASQEQRLKALNTCMSHICAVLAFYVPIIAVSMIHRFWKSAPPVVHVMMSNVYLFVPPMLNPIIYSVKTKEIRRGILKFFHKSQA

SEQ ID NO: 613 - protein, 312 aa, Artificial Sequence
  OR51I2 consensus-c
MGLFNVTHPASFLLTGIPGLESSHSWLAGPLCVMYAVALGGNTVILQAVRVEPSLHEPMYYFLSMLSFSDVAMSMATLPTVLRTFCLNARNIAFDACLIQMFLIHSFSMMESGILLAMSFDRYVAICDPLRYATVLTNEVIAGMGLAVTARSFITLFPLPFLIKRLPICRSNVLSHSYCLHPDMMKLACADITINSIYGLFVLVSTFGMDLFFIFLSYVLILRSVMAIASREERLKALNTCVSHILAVLAFYVPMIGVSTVHRFGKHAPRYIHVLMSNVYLFVPPVLNPLIYSAKTKEIRRAIVRMFHRIKI

SEQ ID NO: 614 - protein, 308 aa, Artificial Sequence
  OR51J1 consensus-c
MKNSNSSLGFLPTTFILVGIPGLEAEHIWISIPFCLMYIIIFLGNGTILHVIRTDIALHQPMYLFLAMLALAEVGVSASTLPTVLGIFLFGNTEISFEACLFPDVLHPFFIDGGSACQAGHVFVAICSHLQPTALYTAPRIWHRSAHYAHGSIALMAPLPALLWPFCPHNFLLLHPNLIHLPCGDISINNIYGLFIVTSTFGLDSLLIVVSYGLILHTVLGIATGEGRKKALNTCGSHVCAVLAYYVPMIGLSMVHRFGHHVSPLLQAMMANAYLFFPPVVNPIVYSIKTKEIRRGIVRMLSEKRRRV

SEQ ID NO: 615 - protein, 315 aa, Artificial Sequence
  OR51L1 consensus-c
MVVWNNSDAMEPIFILRGFPGLEYVHSWLSIPFCLAYLVAFIGNVTILSVIWIESSLHQPMYYFLSILALTDLGMSLSTLPTMLAVLWLDAREIQASACYAQLFFIHTFTFLESSVLLAMAFDRFVAICRPLHYPTILTNSVIGKIGLACLLRSMGVVLPTPLLLRRYHYCHGNALSHAFCLHQDVLKLSCSDARINSIYGLCVVIATLGVDSVFILLSYVLILNAVLGIASREERLKALNTCVSHICVVLIFFVPVIGVSMVHRFGKHLSPIVHILMADIYLLLPPVLNPIVYSVRTKQIRLGILRKFGLRRRF

SEQ ID NO: 616 - protein, 330 aa, Artificial Sequence
  OR51M1 consensus-c
MSAQYSLSPQFMLLSNITQFSPMFYLTGFPGLEAIEHWIFIPFFLMYLVAISGNCFILIIIKTNPRLHTPMYYLLSLLALTDLGLSVSTLPTTMGIFWFNSHSIYFGACQIQMFCIHSFSFMESSVLLVMSFDRFVAICHPLRYSVIITGQRVVRAGLIVILRGPVALIPIVLLLKAFPYCGSVVLSHSFCLHQEVIHLACTDTTFNNLYGLMLVVFTVMLDLVLIALSYGLILHTVAGLASQEEQLRAFQTCTSHLCAVLVFFVPMMGLSLVHRFGKHAPPAVHLLMANVYLFVPPMLNPIIYSIKTKEIRRAIIKLLGLRKASKESWG

SEQ ID NO: 617 - protein, 315 aa, Artificial Sequence
  OR51Q1 consensus-c
MSQVTNTTQEPFYFILTGIPGFEASHIWISIPFCCLYTISIMGNTTILTVIRTEPSLHQPMYLFLSMLALTDLGLTLTTLPTVMQLLWFNVRRISFEACFAQFFFLHGFSFMESSVLLAMSFDRYVAICRPLHYASILTNEVIGRIGLAIICRCVLAVLPSLFLLKRLPFCHSHLLSHSYCLHQDMIRLVCADIRVNSWYGFALVLLIIVVDPLLIVLSYTLILKSILGTASWAERLRALNNCLSHILAVLVLYVPMVGVSMTHRFAKHASPLVHVIMANIYLLAPPVMNPIIYSVKTKQIRQGILNLLSQRNMH

SEQ ID NO: 618 - protein, 323 aa, Artificial Sequence
  OR51S1 consensus-c
MSTLPTQIAPNSSTSMAPTFLLVGMPGLSAVPSWWTLPLITVYLLSALGNGTILWIIALEPTLHRPMYFFLFLLSVSDVGLATALMPTLLGLALAGAHAVPASACLLQMFFVHVFSVMESSVLLAMAIDRALAICRPLHYPALLTNGVISKIGLAIAFRCLGLHLPLPFLLAHMPYCLPQVLTHSYCLHPDVARLACPGAWGAVYSLFVVLSAMGLDPLLIFFSYGLIGRVLQGLGSREDRWKAGQTCAAHLSAVLLFYIPMILLALIDRLRLPIPQPAHTLLSYVHFLLPPLINPILYSVKMKEIRERILKRLQPRKVGCAQ

SEQ ID NO: 619 - protein, 326 aa, Artificial Sequence
  OR51T1 consensus-c
MAIFNNTTSSSSNLLTAFPGLELAHVWISIPVCCLYTIALLGNSMILFVIITERSLHKPMYYFLSMLSAVDLCLTITTLPTVLGVLWFHAREISFKACLIQMFFVHAFSFLESSVLVAMAFDRFMAICNPLKYATVLTDMMILVIGLVICIRQVIFLFPLLLALKTVSFHGGQELSHPFCYHPDVIKYTYSNPWISSFWGMFLQLYLNGTDLLFILFSYVLILRTVLSIVAPKKQQKALSTCVCHICAVTVFYVPMISLSLAHRLFSSTPRVLCSILANIYLLLPPVLNPIIYSLKTKTIRQAMLQLLQSKGSWGPNVRGLRGRWD

SEQ ID NO: 620 - protein, 314 aa, Artificial Sequence
  OR51V1 consensus-c
MSALSSSMITSSSFLLTGFPGLEQQYPWLSIPFSSIYAMVLLGNCMVLHVIRTEPSLHQPMFYFLAMLALTDLCMGLSTVHTVLGILWGLIQEISLDSCIAQSYFIHGLSFMESSVLLAMAFDRYIAICNPLRYSSILTNSRIIKIGVTILGRSFLFITPPIIRLKFFNYCRPHILSHSFCLHQDLLRLACSDIRFNSYYALALVICTLLLDAVLILFSYILILKSVLAIASQEERHKSLQTCVSHICAVLVFYIPIIGLTMVHRFGKHLSPVVHVLMGNIYILFPPLMNPIIYSVKTQQIRTRMQRLFSLKRY

SEQ ID NO: 621 - protein, 312 aa, Artificial Sequence
  OR52A1 consensus-c
MSISNITVFMPSVLTLIGIPGLESVQCWIGIPFCAMYLIAMIGNSLLLIIIKSERSLHEPMYIFLGMLGVTDIALATSIVPKMLGIFWFHVPEIYFDSCLLQMWLIHTFQCIESGILLAMALDRYVAICYPLRHAAIFTHQLVTQIGAVVTLRAAILVAPCLVLIKCRFQFYHTTVISHSYCEHMAIVKLAAENVRVNKIYGLFVAFTVAGFDLTFITLSYIQIFITVFRLPQKEARLKAFNTCIAHICVFLQFYLLAFFSFFTHRFGSHIPPYIHILFSSIYLLVPPFLNPLVYGAKTKQIRIHVVKMFCS

SEQ ID NO: 622 - protein, 316 aa, Artificial Sequence
  OR52A5 consensus-c
MLTFNGSVFMPSVLTLIGIPGLESVQCWIGIPFCAMYLIAVIGNSLILVIIKYENSLHIPMYIFLAMLGATDIALSTCILPKMLGIFWFHLPEISFDACLLQMWLIHSFQAIESGILLAMALDRYVAICIPLRHATIFSQQLLTHIGVGVTLRAAILIAPCLGLIKCRLKHYRTTVVSHSYCEHMAIVKLATEDIRINKIYGLFVAFAILGFDIIFITLSYVQIFITVFQLPQKEARFKAFNTCIAHICVFLQFYLLAFFSFFTHRFGSHIPPYVHILLSNLYLLVPPFLNPIVYGVKTKQIRDHVLKVFFSKKVT

SEQ ID NO: 623 - protein, 322 aa, Artificial Sequence
  OR52B2 consensus-c
MSHTNVTIFHPAVFVLLGIPGLEAYHIWLSIPLCLMYITAVLGNSILIVVIITERNLHEPMYFFLSMLAVTDILLSTTTVPKALAIFWLHAHNIAFDACVTQVFFVHMMFVGESAILLAMAFDRFVAICAPLRYTTVLTWPVVGRIALAIVTRSFCIIFPVIFLLKRLPFCRTNIVPHSYCEHIGVARLACADITVNIWYGFSVPIVMVILDVILIAVSYSLILRAVFRLPSQDARHKALSTCGSHLCVILMFYVPSFFTLLTHRFGRNIPQHVHILLANLYVVVPPMLNPIVYGVKTKQIREGVAHRFFDIKTWCCTSPLG

SEQ ID NO: 624 - protein, 314 aa, Artificial Sequence
  OR52B4 consensus-c
MTTLNHTGVSHTVFHLLGIPGLEDQHMWISIPFFISYVIALLGNSLLIFIILTKRSLHEPMYLFLCMLAGADIVLSTCTVPQALAIFWFHAGEISLDRCITQLFFIHSTFISESGILLVMAFDRYIAICYPLRYTTILTNALIGKIGVTIFLRSYGTIFPIIFLLKRLTFCQNNIIPHTFCEHIGLAKYACNDIRVNIWYGFFVLMSTVVLDVVLIFVSYVLILHAVFHMPSQDARHKALNTCGSHVCVIILFYGPGIFTTLTQRFGRHIPPHIHILLANVCILAPPMLNPIIYGIKTKQIREQVVHFLFIKQK

SEQ ID NO: 625 - protein, 336 aa, Artificial Sequence
  OR52B6 consensus-c
MAQVRALHKIMALFSANSIAAVNNSDTRIAGCLLTGIPGLEHLHIWLSIPFCTMYIAALAGNGILICVILSQPSLHEPMYIFLSMLASADVLLSTSTMPKALANFWLGSSHISFDGCLTQMFFIHFLFVADSAVLLAMAFDRYVAICSPLRYATILTSKVIGKIVAATLTRSFIIMFPSIFLLKRLHYCRINIIAHTFCEHMGIARLSCSDISINVWYGLAAALLSTGLDIILITVSYIHILRAVFRLPSQDARSKALSTCGSHVCVILLFYIPALFSVFAYRFGGRSIPRYVHILLANLYVVIPPMLNPIIYGVRTKQILEGAKQMFSNLAKESK

SEQ ID NO: 626 - protein, 318 aa, Artificial Sequence
  OR52D1 consensus-c
MSASNLSDNHLPDTLFLTGIPGLEAAHFWIAIPFCAMYLVALAGNAALILVIATDNALHAPMYLFLCLLSLTDLALSSTTVPKMLAILWLHAGEISFGGCLAQMFCVHSIYALESSVLLAMAFDRYVAICNPLRYTTILNHTVIGRIGLVGIFRSVAIVSPFIFLLRRLPYCGHHVMAHTYCEHMGIARLACANITVNIVYGLTVALLAMGLDSILIAISYGFILHAVFRLPSHDAQHKALSTCGSHLGVILVFYIPAFFSFLTHRFGHHRVPKHVHIFLANLYVLVPPVLNPIIYGARTKEIRSRLLRLLHLGKTSI

SEQ ID NO: 627 - protein, 313 aa, Artificial Sequence
  OR52E5 consensus-c
MLHTNNTQFHPSSFLLVGIPGLEDVHIWIGFPFFAVYLIALLGNITILFVIQTERSLHQPMFYFLAMLACTDLGLSTATIPKMLGIFWFNLREIVFGACITQMYTIHICTGLESVVLTVMAIDRYIAICNPLRYSMILTNKVIAILGIVIIVRTLVFVTPFIFLILRLPFCGVRIIPHTYCEHMGLAKLACASIRVNVIYGLIAFSVGYIDLSVIGFSYVQILRAVFHLPSWDARLKALSTCGSHVCVMLAFYLPALFSFMTHRFGHNIPHYIHILLANLYVVVPPALNPVIYGVRTKQIRERVLRMLNPKSF

SEQ ID NO: 628 - protein, 311 aa, Artificial Sequence
  OR52E6 consensus-d
MSIANDTQFHPSSFLLLGIPGLEDVHIWIGFPFFFVYLVALLGNAAVLFVIQTEHSLHEPMYYFLAMLDSIDLGLSTATIPKMLGIFWFNLREISFGGCLSQMFFIHFFTAMESIVLVAMAFDRYIAICKPLRYTMILTSKIISLIAGIAILRSLYMVIPLVFLLLRLPFCGHHIIPHTYCEHMGIARLACASIKVNIMFGLGNISLLLLDVLLIILSYVRILYAVFCLPSWEARLKALNTCGSHIGVILAFFTPAFFSFLTHRFGHNIPQYIHIFLANLYVVVPPALNPVIYGVRTKQIRERVLRIKTDH

SEQ ID NO: 629 - protein, 315 aa, Artificial Sequence
  OR52H1 consensus-c
MIIFNLSSYNPGPFILVGIPGLEQFHVWIGIPFCIIYIVAVVGNCILLYLIAVERSLHEPMFFFLSMLAMTDLILSTAGVPKTLSIFWLGAREITFPGCLTQMFFLHYSFVLDSAILMAMAFDRYVAICSPLRYTTILTPKTIIKIAVGISFRSFCIILPDVFLLTRLPFCRTRIIPHTYCEHIGVARLACADISINIWYGFCVPIMTVISDVILIAVSYTLILCAVFRLPSRDARQKALGTCGSHVCVILMFYTPAFFSILAHRFGHNVSRTFHIMFANLYIVIPPALNPIVYGVKTKQIRDKVILLFSTKGTG

SEQ ID NO: 630 - protein, 324 aa, Artificial Sequence
  OR52I1 consensus-c
MLGPPYNHTMETPATFLLVGIPGLQSSHLWLAISLSAMYTTALLGNTLIVTVIWMDSTLHEPMYCFLCVLAAVDIVMASSVVPKMVSIFCSGDSSISFNACFTQMYFVHAATAVETGLLLAMAFDRYVAICKPLHYKRILTPQVMLGMSVTITIRAVTFMTPLSWMVSHLPFCGSNVVLHSYCEHMAVAKLACADPMPSSLYSLIGSSIIVGSDVAFIAASYILILRAVFDLSSKNAQLKALSTCGSHVGVMALYYLPGMASIYVAWLGQDIVPLHTQVLLADLYLIIPPTLNPIIYGLRTKQIRERIWSLLMHFLFDHSNLGS

SEQ ID NO: 631 - protein, 324 aa, Artificial Sequence
  OR52I2 consensus-c
MLGPAYNHTMETPATFFLVGIPGLQSSHLWLAISLSAMYTIALLGNTLIVTVIWMDSTLQEPMYCFLCVLAAVDIVMASSVVPKMVSIFCSGDSSISFNACFTQMYFVHAATAVETGLLLAMAFDRYVAICKPLHYKRILTPQVMLGMSVTITIRAVIFMTPLSWMVSHLPFCGSNVVLHSYCEHIAVAKLACADPMPSSLYSLIGSSIIVGSDVAFIAASYILILRAVFGLSSKNAQLKALSTCGSHVGVMALYYLPGMASIYVAWLGQDVVPLHTQVLLADLYLIIPPTLNPIIYGLRTKQIRERIWSLLMHCLFDHSNLGS

SEQ ID NO: 632 - protein, 311 aa, Artificial Sequence
  OR52J3 consensus-c
MFYHNRSIFHPATFFLIGIPGLEDFHAWISLPFCSVYLVALLGNATILLVIKVEQTLREPMFYFLAILSTIDLALSTTSVPRMLGIFWFDAHEINFGACVAQMFLIHAFTGMEAEVLLAMAFDRYVAICAPLHYTTILTSRVLVGISMCIVIRPVLLTLPMIYLIYRLPFCQAHIIAHSYCEHMGIAKLSCGNIRINAIYGLFVVSFFVLNLVLIGISYVYILRAVFRLPSQDARLKALSTCGSHVGVICVFYIPSVFSFLTHRFGHNIPRYIHILVANLYLVIPPSLNPIIYGVRTKQIRERVLYVFTKK

SEQ ID NO: 633 - protein, 314 aa, Artificial Sequence
  OR52K1 consensus-c
MSASNITSTHPAVFLLVGIPGLEHLHAWISIPFCFAYTLALLGNCTLLFIIQADAALHEPMYLFLAMLATIDLVLSSTTLPKMLAIFWFRDREINFYACLVQMFFLHSFSIMESAVLLAMAFDRYVAICKPLHYTTVLTGPLITKIGMAAVARAVTLMTPLPFLLRRFHYCRGPVIAHCYCEHMAVVRLACGDTRFNNIYGIAVAMFIVVLDLLFVILSYIFILRAVLQLASQEARYKAFGTCVSHIGAILSTYTPVVISSVMHRVARRAAPHVHILLAIFYLLFPPMVNPIIYGVKTKQIRDYVLSLFQRKNV

SEQ ID NO: 634 - protein, 314 aa, Artificial Sequence
  OR52K2 consensus-c
MSASNITSTHPAAFLLMGIPGLEHLHIWISIPFCSAYTLALLGNCTLLFIIQADAALHEPMYLFLAMLAAIDLVLSSSTLPKMLAIFWFRDREINFFACLVQMFFLHSFSIMESAVLLAMAFDRYVAICKPLHYTTVLTGSLITKIGMAAVARAVTLMTPLPFLLRCFHYCRGPVIAHCYCEHMAVVRLACGDTRFNNIYGIAVAMFIVVLDLLFVILSYIFILQAVLQLASQEARYKAFGTCVSHIGAILAFYTPVVISSVMHRVARHAAPHVHILLANFYLLFPPMVNPIIYGVKTKQIRERVLGVFLRKDV

SEQ ID NO: 635 - protein, 321 aa, Artificial Sequence
  OR52N1 consensus-c
MSFLNGTSLTPASFILNGIPGLEEVHLWISFPLCTMYSIAITGNFGLMYLIYSEEALHRPMYIFLALLSFTDVLMCTSTLPNTLCILWFNLKEIDFKACLAQMFFVHTFTGMESGVLMLMALDRYVAICYPLRYATILTNSVIAKAGLLTFLRGVMLVIPFTFLTKRLPYCRGNVIPHTYCDHMSVAKISCGNVRVNAIYGLMVALLIGGFDILCITISYTMILRAVVSLSSADARQKAFSTCTAHICAIVITYVPAFFTFFTHRFGGHTIPPHIHIIMANLYLLMPPTMNPIVYGVKTKQIRESVIRFLLKGKDNSSHNI

SEQ ID NO: 636 - protein, 314 aa, Artificial Sequence
  OR52R1 consensus-c
MLASGNSSSHPVSFILLGIPGLENFQFWIAFPFCAMYAVAVVGNITLLHIIRTDHTLHEPMYLFLAMLAITDLVLSSSTQPKMLAILWFHAHEIEYHACLIQVFFIHAFSSVESGVLMAMALDRYVAICFPLRHSSILTPSVVIKLGAAVMLRGLLWVSPFCFMVSRMPFCPNQVIPQSYCEHMAVLKLVCADTRVNRGYGLFVAFSVVGFDIIVISMSYVMILRAVLQLPSGEARLKAFGTCASHICVILAFYIPALFTFLTHRFGHHVPRVVHIMFANLYLLVPPMLNPIIYGVRTKQIRDRVIQGCCGKDP

SEQ ID NO: 637 - protein, 320 aa, Artificial Sequence
  OR52W1 consensus-c
MAETPQLNSTFLRPTFFILTGIPGLGSAQAWLTLVFGPMYLLALLGNGALLAVVWIDSTLHQPMFLLLATLAATDLGLATSIAPGLLAVLWLGPRPVPYAACLVQMFFVHALTAVESGVLLAMACDRAVAVGRPLHYPVLVTKARVGYAALALALKAVAIVVPFPLLVARFEHFQAKTIGHAYCAHMAVVELVVGNTRANNLYGLALSLAVSGMDILGITGSYGLIAHAVLRLPTREARAKAFGTCSSHICVILAFYVPGLFSYLTHRFGRHTVPKPVHILLSNIYLLLPPALNPLIYGARTKQIRDRLLETFTFRKSQF

SEQ ID NO: 638 - protein, 313 aa, Artificial Sequence
  OR56A5 consensus-c
MTLPSNNSTSPVFEFFLICFPSFQSWQHWLSLPLSLLFLLAMGANATLLITIYLEASLHQPLYYLLSLLSLLDIVLCLTVIPKVLAIFWFDLRSISFPACFLQMFIMNSFLTMESCTFMIMAYDRYVAICKPLQYSSIITDQFVARAAIFVVARNGLLTMPIPILSSRLRYCAGHIIKNCICTNVSVSKLSCDDITLNQSYQFVIGWTLLGSDLILIVLSYFFILKTVLRIKAEGAMAKALGTCGSHFILILFFTTVLLVLVITNLARKRIPPDVPILLNILHHLIPPALNPIVYGVRTKEIKQGIQNLLRRL

SEQ ID NO: 639 - protein, 321 aa, Artificial Sequence
  OR56B4 consensus-c
MDTSTSVTNSSSLQISQFILMGLPGIHEWQHWLSLPLALLYLLALGANLLIMITIQHEPTLHEPMYHFLGILAVVDIGLATTIMPKILAIFWFDAKAISLPECFAQIYAIHCFFCMESGIFLCMAVDRYIAICHPLRYPSIVTEAFVVKATGFMVLRNGLLTIPVPVLAAQRHYCSRNEIDHCLCSNLGVISLACDDITVNKFYQLMLAWILVGSDMALVFSSYALILHSVLRLNSAEAMSKALSTCSSHLILILFFYTGIIVLSVTHLAEKKIPLIPVLLNVLHNVIPPALNPMVYALRMHELRLGFQRLLGLGQDVSKK

SEQ ID NO: 640 - protein, 311 aa, Artificial Sequence
  OR5AN1 consensus-c
MIGGGNITEITYFILLGFSDFPRIIAVLFVIFLVIYITTLTWNLSLIVLIRMDSHLHTPMYFFLSNLSFIDICYVTSTVPKMLSNFFQEQQTITFVGCIVQYFIFSTMGLSESCLMTAMAYDRYAAICNPLLYSSIMSPTLCVWMVLGSYMAGLTASLSQLCALLQLHFCGPNVIRHFFCDMPQLLILSCTDTFFVQVLTAILTMFFGIANALVIMISYGYIVISIMKITSAKGRSKAFNTCASHLTAVSLFYTSGIFVYLSSSSGGSSSFDRFASVFYTVVIPMLNPLIYSLRNKEIKDALKRLQKRKCC

SEQ ID NO: 641 - protein, 309 aa, Artificial Sequence
  M71 consensus-c
MAAENHSTVTEFILGGLTNRPELQLPLFLLFLGIYVVTMVGNLGMITLIGLNSQLHTPMYFFLSNLSLVDLCYSSVITPKMLVNFVSQKNLISYVGCMSQLYFFLVFVIAECYMLTVMAYDRYVAICHPLLYNIIMSHALCSLLVAFVYAMGLIGSTIETGLMLKLNYCEDLISHYFCDILPLMKLSCSSTYDVEMAVFFLAGFNIIVTSLTVLISYAFILSSILRISSTEGRSKAFSTCSSHLAAVGLFYGSTAFMYLKPSTASSLAQENVASVFYTTVIPMLNPLIYSLRNKEVKAALQKTLRRKLF

SEQ ID NO: 642 - protein, 313 aa, Artificial Sequence
  OR9K2 consensus-c
MGDRGTSNHSEMTDFILVGFRVRPELHILLFLLFLLVYAMILLGNVGMMAIIMTDPRLNTPMYFFLGNLSFIDLFYSSVIAPKAMINFWSESKSISFAGCVAQLFLFALFIVTEGFLLAAMAYDRFIAICNPLLYSVQMSTRLCTQLVAGSYFCGCISSVLQTSMTFTLSFCASRAIDHFYCDSRPLQRLSCSDLFIHKMISFSLSCIIILPTIIVIIVSYMYIVSTVLKIHSTEGRKKAFSTCSSHLGVVSVLYGAVFFMYLTPDRFPELSKVASLCYSLVTPMLNPLIYSLRNKDVKEALKKLLEKKNIIL

SEQ ID NO: 643 - DNA, 954 bp, Artificial Sequence
  OR1B1 consensus-c
atgagctgcgcccctaacgccagccattccccagtgttcctgctcctaggatttagtagagccaatatcagctacacactgctgttcttcctgttcctggccatctacctgaccaccatcctgggcaacgttaccctggtgctgctgatcagctgggacagcagactgcacagcccaatgtactacctgctgagaggcctgagcgtgatcgacatgggcctgagcacagtgaccctgcctcagctgctggcccacctggtgtcccactaccccgccatccccgctgctagatgtctggcccagttcttttttttctacgccttcggcgtgaccgacacactggtgatttccgtgatggcccttgatagatacgtggccatctgcgatcctctgcattatgccctggtcatgaacagacagagatgcgcatgcctgctggccctgagctgggtggtgagcatcctgcacaccatgctgcacgtgggcctgcttctgcctctgtgctggaccggcgacgccggcggcaatgtgaacctgccccacttcttctgcgaccaccggcctctgctgcgcgcctcttgttctgatatccacagcaacgagctggccattttcctggaaggcggattcctgatgctgggaccttgtgccctgatcgtgctgtcttatgtgcggatcggcgctaccatcctgcggctgcccagcgccgctggcaggcggagagccgtgtctacatgcggcagccacctgaccatggtgggctttctgtacggaacaatcatctgggtctacttccagcctcctagccaaaacagccagtaccaggatatggtcgccgccgtgatgtacaccgccatcacacctctggctaaccccttcgtgtacagcctgagaaacaaggacgtgaagggcgctctgcacagactgctggagtggggccgggtggactcctga

SEQ ID NO: 644 - DNA, 942 bp, Artificial Sequence
  OR1D2 consensus-c
atggacggcggaaaccagagcggcggctctgagttcctgctgctgggcatctctgaaagccccgagcagcagcgcatcctcttctggatgttcctgagcatgtacctggtgaccgtggtgggcaatgtgctgatcatcctggccatcagcagcgactccagactgcatacacctatgtactttttcctggctaatctgagcttcaccgacctgttcttcgtgacaaacaccatccctaagatgctggtgaacctgcaaagccagaacaaagccatttcttatgccggctgtctgacccagctgtacttcctggtgtccctggtcgccctggataacctgatcctggccgtgatggcctacgaccggtacgtggctatttgcagacctctgcactacaccacagccatgagccctggcctgtgcatcctgcttctgtccctgtgctgggtcctgtctgtgctgtacggcctgatccacaccctgctgatgaccagagtgaccttctgcggcagcagaaagatccactacatcttctgcgagatgtatgtgctgctgcggctggcctgcagcaacacccagatcaaccacacagtgctgatcgccacaggatgttttatctttctcaccccactgggcttcatgatcatgagctacgtgctgatcgttagagccatcctgagaatccccagcgccagcaagaagtacaaggctttcagcacctgcgcctctcacctggctgttgtgtccctgttctacggtacactgtgtatggtgtacctgcagcctctgcacacctacagcatgaaagatagcgtggccaccgtgatgtacgccgtggtgacacctatgatgaaccccttcatctactctctgcggaacaaggacatgcacggcgccctgggaagactgctgctgggcaaggcctttcagcggctcacctga

SEQ ID NO: 645 - DNA, 939 bp, Artificial Sequence
  OR1D4 consensus-d
atggacggcgacaaccagtccgagaacagccagttcctgctgctgggcatgtctgaaagccctgaacagcagcagatccttttttggatgttcctgagcatgtacctggtgaccgtggtgggaaatgtgctgatcatcctggctatctcttccgacagcagactgcatacacctatgtacttcttcctggctaatctgtcattcacggacctgtttttcgtgaccaacaccatccccaagatgctggtgaacctgcaaagccagaacaaggccatcagctacgccggctgtctgacccagctgtactttctcgtttctctggtcaccctggataacctgatcctggccgtgatggcctacgacagatacgtggccatctgctgccccctgcactacgtgaccgccatgagccccggcctttgcgtgctgctgctgtgcctgtgttggggcctgtctgtgctgtatggcctgctgctgaccctgctgatgaccagagtgacattctgtggccctagaaagatccactacctgttctgcgagatgtacgtgctgctgagactggcatgcagcaacacccacatcattcacacagtgctggtggctacaggctgcttcatcttcctgacacccctgggattcatgacaaccagctacgtgcggatcgttagaaccatcctgcagatccctagcgccagcaagaagtacaagaccttcagcacatgcgcctcccacctgggagtggtcagcctcttctacggcaccctggccatggtgtacctccaacctctgcacacctactctatgaaagatagcgtggccacagtgatgtatgccgtggtgacccctatgatgaaccctttcatctacagcctgcggaacaaagatatgcacggcgccctgggcagactgctgggccgcccatttcagcggctgaagtga

SEQ ID NO: 646 - DNA, 945 bp, Artificial Sequence
  OR1E2 consensus-c
atgatgggcagaaaccagaccagcatcagcgagttcctgctgctgggcctgcctatccagcctgagcagcagaatctgttctacgccctgttcctggctatgtacctgaccacactgctgggcaacctgcttatcatcgtgctgattaggctggacagccatctgcacacccctatgtatctgttcctgagcaacctgtccttctccgatctgtgcttcagcagcgtgacaatgcctaagctgctgcaaaacatgcagtcccaggacccctctatcccttacgccggctgcctgacccagatgtacttctttctgtttttctctgatctggaaagcttcctgctggtggctatggcctacgacagatacgtggctatctgttttccactgcactacaccgccatcatgagccctatgctgtgtctgagcctggtcgccctgagctgggtcctgaccaccttccacgccatgctgcacacactgttgatggctagactgtgtttctgcgccgataatgtgatcccccacttcttctgcgacatgagcgccctgctgaaactcgcctgctctgacaccagagtgaacgagctggtgattttcatcatgggcggactgatcctggtgatcccattcctgctgatcctgggaagctacgcaagaatcgtgtccagcatcctgaaggtgcccagcagcaagggcatctgcaaggccttcagcacatgcggtagccacctgtctgtggtttccctgttttacggcaccgtgatcggcctgtacctgtgtccttctgccaacaacagcaccctgaaggaaacagtgatggccatgatgtatacagtggtgacccctatgctcaaccccttcatctacagcctgagaaatcgggacatgaaaggcgcccttgagcgggtgatctgcaagcggaagaacccttttagtctgtga

SEQ ID NO: 647 - DNA, 939 bp, Artificial Sequence
  OR1F1 consensus-c
atgcgcggagccaaccagagcagcgtgagcgagttcctgctgctgggactgtctagacagcctcagcaacagcagctgctgtttgtgctgttcctgagcatgtacctggccacagtgctgggcaacctgctcatcctgctggctatctctatcgacagccggctgcatacccctatgtacttctttctgagcaacctgtctttcgtggacatctgcttcagctctaccaccgtgcccaagatgctggctaatcacatcctgggcacacagacaatctccttttccggctgcctgacccagatgtacttcgtgttcatgttcgttgacatggacaatttcctgctggccgtgatggcctacgacagattcgtggccgtctgccaccctctgcactacagcaccaaaatgacccaccagctgtgcgccctcctcgtggcaggcagctgggtgatcgccaatctgaacgtgctgctgcacaccctgctgatggctagactgtccttttgcgccgataacgccatcccccacttcttctgtgacgtgacacctctgctgaaactgtcttgttctgatacccacctgaacgaggtgatgatcctgacagaaggcgccctaatcatgattacacctttcgtgtgcatcctggccagctacatgcacatcacctgtgccgtcctgcgggtgcctagcacaaagggcagatggaaggcttttagcacctgcggcagccacctggctgtggtcagcctgttctacggcaccatcatcgccgtgtacttcaaccctctgtccagccacagcgccgagaaggacaccgccgccaccgtgatgtatacagtggtgaccccaatgctgaaccccttcatctacagcctgcggaacagagatctgaagggcgccctgaagaaggtggtgggaagaaaggtgttcagcgtgtga

SEQ ID NO: 648 - DNA, 942 bp, Artificial Sequence
  OR1G1 consensus-c
atgggctgggaaaaccttacaagcatctctgagttcttcctgttgggcctgtccgagcaacctgagcagcaggaggtgctgttcggactgtttctgagcatgtacctggtcaccgtggccggcaacctgctgatcattctggctatcatcaccgatgcccagctgcacacacctatgtacttcttcctcgccaacctgtctctggctgacgcatgcttcgtgtccacaaccgtgccaaagatgctggctaatatctggatccagaaccaggtgatcagctacgccggatgtctgtcacagctgtacttcttcatgctgttcgtgatgctggaagccttcctgctagccgtgatggcctacgacagatacgtggccatctgccaccccctgcactatatcatggtgatgagccctggcctctgtgtgctgctggtgtctgctagctggatcatgaatgccctgcactctctgctgcataccctgctgatgaacagccttagcttttgcgccgatcacgagattccccacttcttttgcgacatcaaccctctgctgtccctgtcttgcaccgaccctttcatcaacgagctggtgatcttcaccaccggcggcctggccggactggtgtgcgtgctgtgtctgatcatcagctacacctacatcttcagcacaatcctgaagatccctagcgcccagggcaagagaaaagcctttagcacctgcagcagccacctgagcgtggtgtccctgttcttcggcaccagcttctgcgtgtacttttctcccccttctaccagaagcgcccagaaaggcacagtggccagcgtgatgtatacagttgtgacccctatgctgaaccccttcatctacagcctgcggaaccgggacatcaagagcagcctgagaaagctgatctgggtcaggaagatccacagcccatga

SEQ ID NO: 649 - DNA, 942 bp, Artificial Sequence
  OR1I1 consensus-c
atggaacccgagaaccagaccgaggtgtccgagttcctgctgctgggcctgtctgaaaagcctgaacaccagacactgctgttcggcctgttcctgtccatgtacctggtgaccatcttcggcaatctgctgatcatcctggctattatcactgattcccacctgcacacccctatgtacttctttctgagcaacctgagcctggtcgacatcttcttcagctctacaacagtgcctaagatgctggtgaacctgtggacccagtctagagccattcctttcgccggctgtctggcccagatgtacgccttccacctgttcggaacaatggacagcttcctgctggccgtgatggccatcgacagattcgtggctatcgtgcaccctctgcggtacctggtcatcatgagccctagagtgtgcggactgctggtgggcggcagctggctgatcaccaatctgcagagcctcgttcatacatgcctgatggctcagctcaccttctgcgccggatctgagatcccccacttcttttgcgacctgatgcctctgctgaagctgagctgcagcgacacccacaccaacgagctggtgatcttcgcttttggaatcgtgatgggcatcagccccctgagctgcatcctgctgtcatatatctgcatcttttgggccgtgttcaagatccccagcgcccagggcaagtggaaggcctttagcacctgtggcagccacctcaccgtggtgtctcttttctacggcaccatcttcgccgtgtacctgcaacctgccagcccatctagcagccagaaagataaggccgccgccctgatgtgcggcgtggtcatcccaatgctgaaccccttcatctacagcctgcgcaacaaggatatgaaagccgctctgagaaagctgatcggcaaagtggccgtgtgtcctcggtga

SEQ ID NO: 650 - DNA, 942 bp, Artificial Sequence
  OR1J1 consensus-c
atgcggcctgaaaaccagagctccgtgtctgagttcctgctgctcggacttcctatccggcccgagcagcagggcgtgttcttcgccctgttcctgggcatgtacctgacaaccgtgctgggaaatctgctgatcatcctgctgatcagactggatagcagactgcacacacctatgtactttttcctgtctcatctggccttcactgatatcagcttcagcagcgtgaccgtgccaaagatgctgatgaacatgcagacccagcacaaaagcatcccttataagggatgtatcagccagacatacttcttcatcttctttgccgatctggacagcttcctgatcacaagcatggcctacgacagatacgtggccatttgtcaccccctgcactacaccaccatcatgagccagtctcagtgcgtgatgctggtcgccggctcttgggtgatcgcgtgcgcctgtgccctcctgcacaccctgctgctggctagactgagcttttgcgccgaccacaccattccccacttcttctgcgacctggccgctctcctgaagctgtcctgcagcgacacctccctgaatcaactggttatcttcaccgctggcctgaccgccatcatgctgccttttctgtgcatcctggtgtcctacggccacatcggcgccacaatcctgagggtgcccagcacaaagggcatctgcaaggccctgtccacctgcggcagccacctgagcgtggtcacactgtactacggcgctatcatcggcctgtacttcctgcctagcagcaacaacaccaacgacaagaacatcatcgcctctctgatgtatacagtggtgacccctatgctgaacccattcatctacagcctgcggaacaaggacatgaaaggcgccctgagaaagctgctgtctaaaaagacctacagcagccattga

SEQ ID NO: 651 - DNA, 939 bp, Artificial Sequence
  OR1J4 consensus-c
atgcggagaaaccagagctctgtgagtgagttcctgctgctgggacttcctatccggcctgagcagcagggcgtcttttttgccctgttcctgggcatgtacctgacaaccgtgctgggcaacctgctcatcatcctgctgatcagactggatagcagactgcacaccccaatgtacttctttctgagccacctggctttgacagacgtgtccttcagcagcgtgaccgtgcccaagatgctgctgaatatgcagacccaagaccagtccatcccttacgccggctgtgtgacacagatgtacttcttcatcttcttcaccgacctggacaacttcctgctgacctctatggcctacgacagatacgtggccatctgccaccccctgcactacaccacaatcatgagagagggcctgtgcaacctgctggtggccgtgagctggatcctgtcttgcgccagcgccctgagccacacactgctgctggcccagctgagcttctgtgctgataacaccatccctcacttcttctgcgacctggtggccctgcttaaactgagctgcagcgacaccagcctgaacgagctggtgatcttcacggtgggcgtggctgttatcaccctgcctctgatctgcatcctgatcagctacggccacatcggagccacaatcctgaaggtgcctagcactaagggcatctgtaaagccctctccacatgcggcagccatctgagcgtggtgagtctgtattacggcaccattattggactgtactttttccccagctcctccaccagctctgataaggacatcatcgcttctgtgatgtataccgtggtcacccctctgctgaaccccttcatctacagcctgaggaatagagatatgaagggcgccctggaaaagctgtttaaccgggccaccgtgctgtctcagtga

SEQ ID NO: 652 - DNA, 951 bp, Artificial Sequence
  OR1K1 consensus-c
atggacgccgccaacgaaagcagcgaaggcatcccctttatcctcctgggcctgacaacatctccaggacagcagcggcctctgtttgtgctgttcctggtgctgtacgtggccggcatcctgggcaacggcctgatcgtggccgccatccgggcctctcctgccctgcacgcccctatgtattttctgctggcccatctgagcttcgctgacctgtgcttcacctccgtgacagtgcccaagatgctggccaatctgctggctcatgatagaagcatctccctggctggctgcctgacccagatgtatttcttcttcgccctgggagtgacagacagctgtctgctggcagccatggcctacgacagatacgtggccatcagacacccactgcactacgccacaagaatgagcagagccgtgtgcaccgccctggtgggcaccgcctggctcgtcagccacgtgcacagcctgctgcacatccttctgatggctagactgtctttctgcgccagccaccaagtgcctcacttcttttgcgaccaccagcccctgcttcggctgagctgcagcgacaccagacacattcagctgctgatcttcaccgagggagccgctgtggtggtgacccctttcctgctgatcctggcaagctacggcgccatcgccgctgccgtgctgagactgccttctgccagcggcagactgcgggccgtgtccacctgtggaagccacctggccgtggtcggcctgttctacggcaccgtgatcgctgtgtacttccagcctacgtccaggtacgaggccgagcggggcagagtggccaccgtgatgtacaccgttgtcacacctatgctgaaccccgtgatttactctttacgcaacagagatgtgcagggcgccctgagagccctgttcaccggccggcggatcagcgctagcgatagctga

SEQ ID NO: 653 - DNA, 933 bp, Artificial Sequence
  OR1L1 consensus-c
atgggcagaaacaacctgacccggcctagcgagtttatcctgctgggcctgtctagtagacctgaagatcaaaagcctctgttcgccgtgttcctgcctatctacctgatcacagtgattggcaacctgctgatcatcctggccattagaagcgacaccagactgcagaccccaatgtacttcttcctctccatcctgtccttcgtggacatctgctacgtgaccgtgatcatcccaaagatgctggtgaacttcctgtctgagacaaagaccatcagctacggcgagtgcctgacccagatgtactttttcctggccttcggcaataccgacagctacctcctggctgctatggccatcgaccggtacgtggccatctgcaacccttttcactacatcactatcatgagccataggcggtgcgtgctgctgctggtcctgtctttttgtatcccccacctgcacagcctgctgcacatcctcctgaccaaccagctgatcttctgcgcctctaatgtgatccaccacttcttctgtgatgaccagcccgtgctgaagctgagctgcagcagccacttcgtgaaggaaatcaccgtgatgaccgagggcctggctgtgatcatgacacctttcagctgtatcattatcagctacctgcggatccttatcaccgtgctgaaaatcccctccgccgccggaaaaagaaaggcctttagcacatgcggcagccacctgacagttgtgacactgttctacggatccatctcttatgtgtacttccagcctctgagcaactacaccgtcaaggacagaatcgccaccatcatttatacaatcctgacccctatgctgaaccccttcatctacagcctgagaaacaaggatatgaaacagggcctggccaagctgatgcacagaatgaagtgccagtga

SEQ ID NO: 654 - DNA, 978 bp, Artificial Sequence
  OR1L3 consensus-c
atgggcatgagcaatctgacaaggctgagcgagttcatcctgctcggcctgagctctagacctgaagatcaaaagcccctgttcgccctgttcctgatcatgtacctggttacactgatgggcaacctgctgatcatcctggccattagaagtgatcctcagctgcagaaccccatgtacttcttcctgtctatcctgagcttcgccgacatctgttacaccaccgtgatcgtgcctaagatgctggtgaatttcctgtctgagaagaaaaccatcagctacgccgagtgcctggcccagatgtattttttcctcgtctttggaaacatcgacagctacctgctggccgccatggctatcgacagatacgtggccatctgcaaccctttccactacgtgaccgtgatgaaccacagatgctgcgtgctgctgctggccttctccatcgcctttagctacctgcacagcctgctccatgtgctgctggtcaatcggctgacattctgcgcctccaacgtgatccaccacttcttctgcgacgtgaacccagtgcttaaactggcttgtagcagcacctttgtgaacgaggtggtggccatgaccgagggactggcatctgtgatggcccctttcgtgtgcatcatcatctcttacctgagaatcctgatcgccgtgctgaagatccccagcgccgctggcaagcacaaggccttcagcacatgcagcagccacctgaccgtcgtgaccctgttctacggcagcatcagctatgtgtacttccagcctctgtccagctacacagtgaaggaccggatcgctacaatcatctacaccgtgctgaccagcatgctgaacccctttatctacagcctgcggaacaaagatatgaagcggggcctggaaaagctaatcagcagaattaagtcccagatggacagactgtctacaaccaagaccaacaagatttgtggcccttga

SEQ ID NO: 655 - DNA, 936 bp, Artificial Sequence
  OR1L4 consensus-c
atggaaaccaagaactacagctccagcacatctggcttcatcctgctgggcctgagctctaatccccaactgcagaagcctctgtttgccatcttcctgatcatgtacctggtgaccgtggtgggcaacgtgctgatcatcctggccatccactctgattccagactgcacacccctatgtacttcttcctgagcaatctgagcttcatggacatctgttttaccaccgtgatcgtgccaaagatgctggtcaacctgctgtctgagacaaaaatcatctcctacgttggatgtctggtgcagatgtatttcttcatggcctttggcaacaccgacagctacctgctcgcttccatggccatcgaccgcctggtggctatctgcaaccctttccactacgacgtggtaatgaaccccagaagatgcctgctgatgctcctgggcagctgtaccatcagccacctgcacagcctcctgcgggtgctgctgatgagcagactgtctttctgcgcctctcacgtgattaagcacttcttttgcgacacccagcctgtgctgaagctgagctgcagcgataccagcagcagccagatcgtggtgatgacagagacactggccgtgatcgtcacccctttcctgtgcatcctgttcagctatctgaggatcatcattacagtgctgagaatccccagcgccgctggcaagtggaaggccttctctacatgcggaagccatctgaccgtggtcgtgctgttctacggcagcgtgatctacgtgtacttccggcctctgtccatgtactctgtggtgaaagacagagtggccaccgtgatgtacaccgtggtgacacctatgctgaaccccttcatctacagcctgcggaacaaggatatgaaaagaggcctgagaaagctgcgggacagaatccacagctga

SEQ ID NO: 656 - DNA, 936 bp, Artificial Sequence
  OR1L6 consensus-c
atggaaatcaagaactactcctccagcacaagcggcttcatcctgctgggcctgagctctaatccccagctgcagaaacctctgttcgccatcttcctgatcatgtacctggtcaccgtggtcggaaacgtgctgatcatcctggccatccactctgatagcagactgcatacccctatgtacttcttcctgagcaacctgtcttttatggacatctgcttcaccaccgtgatcgtccccaagatgctggtgaacctgctcagcgagacaaaggtgatcagctacgtgggctgcctggtgcagatgtacttcttcatggctttcggcaacaccgacagctacctgctggcttctatggccatcgaccgcctcgtggccatttgtaatccactgcactacgacgtggtgatgaaccctagaagatgcctgctgatgctgctgggatcttgcaccatcagccacctgcacagcctgttccgggtgctgctgatgagcagactgtccttctgcgccagccacgtgatcaagcacttcttttgcgacacccaacctgtgctgaagctgtcttgtagcgataccagcagctcccagatcgtggtgatgaccgagacactggccgtgattgtgacacctttcctgtgcatcctgtttagctacctgcggatcatcgtgacagttctgaggatccccagcgccgccggcaagtggaaggccttctccacctgtggcagccacctgacagtggtggccctgttctacggctctatcatctacgtgtactttcggcctctgagcatgtatagcgtggttaaggacagagtggctacagtgatgtacaccgtggtgacccctatgctgaaccccttcatctacagcctgcggaacaaggacatgaaaagaggcctgaaaaagctgagagatagaatctatagatga

SEQ ID NO: 657 - DNA, 930 bp, Artificial Sequence
  OR1L8 consensus-c
atggaaagagtgaaccagacaagcagcgtgtccgagttcattctgctgggcctgagctctagacctgaagatcagaagcctctgtttatcctgttcctgaccgtgtacctggtcacaattaccggcaacctgctgatcatcctggctatccggagcgacccccagctgcaaacccctatgtactttttcctctccttcctgtccttcaccgacatctgcttcactacaaccatcgtgccaaggatgctggtcaatttcctgtccgagaagaccatcagctacgccggctgcctgacacagatgtacttcatctacgccctgggaaataccgatagctgtctgctggccgtgatggccttcgacagatacgtggccatctgtgaccctttccactacgtgacaaccatgagccaccatagatgcgtgctgctggtggcttttagctgcagcctgccccacctgcacagcctgctgcacaccctgctgctcaacagactgacattctgcgacagcaacgtgatccaccacttcttgtgcgatctgtcccctctgctcaagctgtcttgcagcagcaccttcgttaacgagatcgtgatcatgaccgagggctctgtggtcctggtgacccctttcctgtgcatcgcctttagctacatcagaatcctgatcaccgtgctgaaaatccccagcgccgctggcaagcgcaaggccttcagcacctgtggctctcacctgaccgtggtgacactgttctatggaagcatcttctatgtgtacctgcagcctcttagtacatacaccgtgcgggaccacgtggccacaatcgtgtacaccgtgctgtctagcatgctgaacccctttatctacagcctgcggaacaaggacctgaagcagggcctgagaaagctgatgggcagacggaaatcttga

SEQ ID NO: 658 - DNA, 942 bp, Artificial Sequence
  OR1M1 consensus-c
atggaacctagaaaccagaccagcgctagccagttcattctgttgggcctgtccgagaagcctgagcaggagacactgctgttttctctgttcctgtgcatgtacctggtgaccgtggtcggcaacctgctcatcatcctggccatctccatcgacagccacctgcacacccctatgtatttcttcctggctaatctgagcctggtggacttctgtctggccaccaacaccatccccaagatgctggtgtccctgcaaacaggatctaaggccatttcctacccctgctgcctgacccagatgtactttttccacttcttcggcatcgtggatagcgtgatcatcgccgtgatggcctacgacagattcgtggccatctgccaccctctgcattacgccacaatcatgagccctcggctctgcggcctgctggtgggagccccttgggccttcagctgcttcatcagcctgacccacatcctgctgatggctagactggtgttctgtggctctcacgaggtgccccactacttctgcgacctgacacctatcctgagactgtcttgtaccgacaccagcgttaacagaatcttcatcctgatcgtggccggaatggtgatcgccacaccattcgtgtgcatcctggcctcttatgcccgcatcctggtcgccatcatgaaagtgccaagcgccggcggcagaaaaaaggcttttagcacctgcagcagccacctgagcgtggtggccctgttttacggcaccaccatcggcgtgtacctgtgtcctagcagtgtgcggaccgccgtgaaggaaaaggccagcgccgtgatgtacaccgccgttacacctatgctgaaccccttcatctacagcctgagaaatagagatctgaagggcgctctgcggaagctggtgaaccggaagatcacaagctctagctga

SEQ ID NO: 659 - DNA, 945 bp, Artificial Sequence
  OR1Q1 consensus-c
atggacaacaccaactggacaagcgtgtcccactttgtgctgctgggcatcagcacccaccctgaggaacagatccctctgttcctgctgttcctcctgatgtacgctatcaacatcagcggcaacttcgccatcattacactgatcatcagcgcccctagactgcacacacctatgtacatcttcctgagcaacctggccctggccgacatctgtttcacctctaccacagtgcccaagatgctgcagaacatcttctccccaacaaaggccatctcttatatgggctgcctggcccaaacatacttcttcatttgcttcgccgccatggaaaacttcctcctggccgtgatggcctacgacagatacatcgctatttgtcacccattcagataccctatgatcctgaccagaatgctgtgcgtgcagatggtggccatgtgccacgccctgtcccacctgcacgccctgctgcataccttcctgatgggaagactgatcttttgtgctgataatagaatcccccacttcttctgcgacctgtaccccctgatgaaaatctcatgcagcagcacctacctgaataccctgatgatccacaccgagggcgtgatcgtgatcaacggagccctggctttcatcatcgccagctacgcctgcatcatatctgttgtgctgagaatccccagcgccaagggcaagtggcgggcctttagcacatgcggcagccacctgaccgtggtggctatcttctacggcacactgacatgggtgtactttcggcctctgtctagctattctgtgaccaaaggcagaatcatcaccgtcatgtacaccgtggtcacccctatgcttaatcctttcatctacagcctgcggaacggagatgtgaagggcgctttcagaaagtggatgagcaggatccagaccagcttctttcggtga

SEQ ID NO: 660 - DNA, 942 bp, Artificial Sequence
  OR1S1 consensus-c
atgcaccagggcaatcaaacaacaatcagcgagttcctgctgcttggactctctaatcaggccgaacagcagaacctgctgtttgtgctgttcctgggcatgtatctggtgacagtggtgggcaacggcctgatcatccttgctatctctctggacagctacctgcacacacctatgtacctgttcctggccaacctgagcttcgccgacatctccagcatcagcaccagcgtgccaaagatgctgatgaacatccagaccaagagccagagcatcagctacgagagctgtatcacacagatgtactttagcatcgtctttgtggtgatcgacaacttcctgctgggagtgatggcctacgacagattcgtggccatctgccaccctctgaactacaccaccatcatgcggcctagactgtgcatcctgctcaccgtgatcccttgggtcctgagcaacatcgtggccctgacccataccctgctgctgattcagctgctgttttgcgaccacaacaccctgcctcacttcttctgtgatctggctcctctgctgaagctgtcctgcagcgataccctgatcaacgagctggtgctgtttatcgtcggcctgtctgtgattacattccccttcgccctgatcctgttctcctacgtgtgcatcgtgcgggccgtgctgagaatctcttctacggaaggcaagtggaaggccttcagcacatgcggcagccacctgaccgtggtgctgctgttctacggcaccatcgtgggcgtgtacttcttcccttccagcacccaccccgatgataccgacaagataggagctgttctgttcaccgtggtgacccccatgatgaaccccttcatctacagcctgcggaacaaggacatgaaaggcgccctcagaaagctgatcaatagaaaaatcttcagcctgctgtga

SEQ ID NO: 661 - DNA, 978 bp, Artificial Sequence
  OR1S2 consensus-c
atgaaaaccctgtgtagcttcctgcagatctctagaaatatgcaccaggagaaccagaccaccatcacggagttcatcctgctgggcctgtctaaccaggccgagcaccagaacctgctgtttgtgctgttcctgtctatgtacctggtgaccgtggtgggcaatggcctgattatcctggccatcagcctggacatctacctgcacacaccaatgtacctgttcctggccaacctgtcttttgctgatatctctagcattagcaatagcgtgccaaagatgctggtgaacatccaaacaaacagccagagcatctcctacgagagctgcatcacccaaatgtatttcagcatcgtgttcgtggtcaccgacaacctcctgctgggaacaatggcctacgacagattcgtggccatctgccaccccctgaactacaccacactgatgcggcctagattctgcattctgctgacagtgatcagctggttcctgtccaatatcatcgccctgacacacaccttgctgctgatccagctgctcttctgcgaccacaacaccctgcctcacttcttctgtgacctggcccctctgctgaagctgagctgcagcgacaccatgatcaacgagctggtgctgttcatcgtgggactgagcgtgatcatcttcccttttgccctgatcttcttctcctacgtgtgtatcatcagagccgtgctgcgcatcagctctacccagggcaagtggaaggccttcagcacatgcggcagccacctgacagtggtgctgctgttttacggtaccatcgtcggcgtgtactttttccccagctccacccatcctgaagataccgataagatcggcgctgtcctgtttaccgtggttacccctatgatgaaccccttcatctacagcctgcggaacaaggacatgaaaggcgctctgcggaagcttatcaacagaaagatctccagcctgtga

SEQ ID NO: 662 - DNA, 942 bp, Artificial Sequence
  OR2A1 consensus-c
atgggcgaaaaccaaacaatggtgacagagttcatcctcctgggattttgtctgggccctagaatccagatgctgctgttcggcctgttcagcctgttctacatcttcaccctgctgggcaacggcgctatccttggattgatctccctggacagcagactgcacacacctatgtacttcttcctcagccacctggccatcgtggacatcgcctacgcctgcaacaccgtgccccagatgctggtgaacctgctgcacccagccaagcctatcagctttgctggctgcatgacccagacatttctgttcctgaccttcgcccacaccgagtgcctgctgctggttgtgatgagctacgatagatacgtggccatttgccaccccctgagatattctgtgatcatgagctggcgggtgtgcatcaccctggccgtgaccagctgggcctgcggctccctgctggctctggtgcacgtggtgctgatcctgcgcctgcctttctgtggaccccacgagatcaaccacttcttctgcgagatcctgagcgtgctgaagctggcctgtgccgacacctggctgaaccaggtggtgatcttcgccgcctgcgtgttcatcctcgtgggaccactgtgcctggtcctggtttcttactctaggatcctggctgctattcttcggatccagtccggcgagggcagacggaaggccttctcaacatgcagcagccacctgtgtgtggtgggcctgtttttcggcagcgccatcgtgatgtacatggcccctaaaagcagacaccctgaggaacagcagaaaatcctgtttctgttttacagcttcttcaaccccatgctgaatcctctgatctacagcctgagaaatgccgaggtcaagggcgccctgcggagagccctgtgcaaggaaagccattctcagctggaatga

SEQ ID NO: 663 - DNA, 933 bp, Artificial Sequence
  OR2A5 consensus-c
atgaccgaaaaccagacatgggtcaccgagttcatcctcctgggcttccccctgtctccaagaatccaaatgctgctgtttggcctgttcagcctgttctacgtgttcaccctgctgggcaacggcgccatcctgggactgatctggttggattccagactgcacacccctatgtacttcttcctgagccacctggctattgtggacatcagctatgccagcaacaacgtgcccaaaatgctggcaaatctgctgaacaagagaaagaccatctcttttgtgccatgtatcatgcagacattcctgtacatggcttttgcccacacagagtgcctgatccttgtcatgatgagctacgacagatacgtggccatctgccaccccctgcagtacagcgtgatcatgagctggagagtgtgcaccgtgctcgccgtgaccagctgggcctgtggcagcctgctggccctggtgcacgtggtcctcatcctgcggctgcctttctgcggcccccacgagatcaaccacttcttctgcgagatcctgtctgtgctcaagctggcctgcgccgacacctggctgaaccaggtggtgatcttcgccgccagcgtgttcatcctggttggacctctgtgtctggtgctggtgtcctataccagaatcctggccgctattctgaggatccagagcggcgaaggcagacggaaggccttctcaacatgctccagccacctgtgcgtggtgggcctgttcttcggatctgccatcgtgatgtacatggcccctaaaagcagacatcctgaggaacagcagaagatcctgtccctgttctacagcctgtttaaccctatgctgaatcctctgatctacagcctgcgcaacgccgaggtgaagggcgctctgaagcgggtgctgtggaagcagcggagcaagtga

SEQ ID NO: 664 - DNA, 933 bp, Artificial Sequence
  OR2A7 consensus-c
atgggcgacaacatcaccagcatcacagagttcctgctgctcggcttccccgtgggccccagaatccagatgctgctgttcggcctgtttagcctcttctacgtgttcaccctgctgggcaacggcaccatcctgggactgatctccctggacagccggctgcacacccctatgtacttctttctgtcccacctggccgtggtggacattgcctacgcctgtaataccgtgcctcaaatgctggtcaacctgcttcatcctgccaagcctatcagcttcgccggatgtatgacacagaccttcctgttttctacattcgccgtgaccgagtgcctgctcctggtggtgatgagctatgatagatacgtggccatctgccaccccctgcggtacctggctatcatgacctggcgggtgtgcatcacactggctgtgacaagctggaccatcggcgtgctgctgtccctgatccacctggtcctgctgctgcctctgccattctgcagacctcagaagatcaatcacttcttctgtgaaatcctggctgttctgaaactggcttgtgccgatacccacatcaacgagaacatggtgctggccggcgccatttctggcctggtgggaccactgtctacaatcgtggtgagctacatgtgcatcttgtgcgccatcctgcagatccagagcagagagggccagagaaaggccttcagcacctgcagcagccacctgtgcgtggtgggcctgttttacggcacagccatcatcatgtatgtgggacctagatacggcaatcctaaggaacagaaaaagtacctgctgctgttccacagcctgttcaaccccatgctgaaccctctgatctactctctgaggaacagcgaggtgaagaacaccctgaagcgggttctgggcgtggaaagagccctgtga

SEQ ID NO: 665 - DNA, 933 bp, Artificial Sequence
  OR2A14 consensus-c
atgggcggcaaccagacctggatcaccgaggtgaccctgctgggcttccaggtcgaccccgccctcgaaatcttcctgttcggactgttcagcctgttttatacactgacactgctgggcaatggcgtgatcctgggactgatctgcctggattgcagactgcacacccctatgtacttcttcctgtctcatctggctattgtggatatgagctacgccagcaacaacgtgccaaagatgctggccaacctggtgaaccaaaagcggaccatcagcttcgtgccctgcatcatgcagaccttcctgtacctggcctttgctcacgtggaatgcctgatcctggttgtgatgagctacgacagatacgtggccatttgtcaccctctgcactacaccgtgatcatgtcctggcgggtgtgcaccgtgctggccgtgacaagctgggtcttttcttttctgctggccctggtgcacctggtgctgatcttaagactgcctttctgcggcccccacgagatcaaccacttcttctgtgaaatcctgtcagtgctgaagctggcctgcgccgacacatggctgaaccaggtggtcatcttcgccgcttgtgtgttcatcctggttggacctctgtgtctggtgctggtgtcctacctgcggatcctggcagctatcctgaggatccagtccggcgagggcagacggaaagccttcagcacatgcagcagccacctctgcgtggtgggcctgttctttggcagcgccatcgtgatgtacatggcccctaagagcagacaccccgaggagcagcagaaaatcctgtctctgttctactctctgttcaaccctatgcttaatcctctgatctacagcctgcggaacgccgaggtgaagggcgccctgagaagagccctgagaaaggaaagactgacctga

SEQ ID NO: 666 - DNA, 942 bp, Artificial Sequence
  OR2B2 consensus-c
atgaactgggtcaatgagagcgttccccaggagtttatcctgctcggctttagcgacagaccttggctggaactgcctctgttcgtggtgttcctggtctcctacatcctgacaatcttcggaaatctggccatcatcctggtttctagactggatttcaagctgcatacccctatgtacttcttcctgaccaacctgagcctgctggacctgtgctacaccaccagcacagtgcctcagatgctggtgaacatctgcagcacaagaaaggtgatcagctatggaggatgtgtggcccaactgttcatcttcctggccctgggctctaccgagtgcctgctgcttgctgtgatgtcattcgaccggttcgtggcaatctgcagacccctgcactacagcgtgatcatgcaccagcggctgtgtctgcagctggccgctgcctcttggatcagcggctttagcaacagcgtgctgcagagcacatggaccctgcagatgcctctgtgcggccacaaggaagtggatcacttcttctgcgaggtccctgccctgctgaagctgagctgcgtggacaccacagccaacgaggccgagctgtttttcattagcgtgctgtttctgctcatccccgtgaccctgatcctgatcagctacgccttcatcgtgcaggccgtgttgagaatccagtccgctgaaggcaggcggaaggcctttggcacctgtggcagccacctgatcgtggtgtctctcttctacggcacagccatctacatgtacctgcaacctccatctccagccagcaaggatagaggcaagatggtgtccctgttctacggcatcatcacccctatgctgaaccccctgatctacaccctgcggaacaaagacgtgaagggcgccttcaaaagactggtggctagagtgttcctgatcaagaaatga

SEQ ID NO: 667 - DNA, 942 bp, Artificial Sequence
  OR2B3 consensus-c
atgaactgggctaacgagagcagccctaaggagttcatcttgctgggcttctctgatagaccttggctgcagatgcctctgttcgtgctgctgctgatcagctatacaattaccattttcggcaacgtgtccatcatgatggtgtgcatcctggatcctaagctgcacaccccaatgtacttctttctgacaaatctgagcatcctcgatctgtgctacaccaccagcacagtgccccacatgctggtgaacatctgctgcaacaagaaaaccatctcctacggcggatgtgtggctcagctgatcatcttcctggctctgggcgctacagagtgcctgctgctggccgtgatgagctttgaccggtacgtggccatctgtagaccactgcactacgtcgtgatcatgaattactggttctgcctgcggatggccgccttctcttggctgaccggctttagcaactctgtgctccagagcagcctgacactgaacatgcctcggtgcggccaccaggaggtggaccatttcttctgtgaagtgcctgccctgctgaagctgtcctgcgccgacaccaagcctatcgaggccgagctgttcttcttcagcgtgctgatcctgctgatccccgtgaccctgatcctgatcagctacggatttatcgcccaggccgtgctgagaatcagaagcgccgagggcagaagaaaggcctttggcacctgtggcagccacatggtggtggtcagcctgttcttcggaacagccatctatatgtacctgcaaccccccagcagcacctctaaggactggggcaagatggtttctctgttctacggcatcatcacccctatgctgaaccctctgatctactccctgcgcaacaaagacatgaaagaagccttcaagcgggtgatgcccagaatctttttctgcaagaagtga

SEQ ID NO: 668 - DNA, 942 bp, Artificial Sequence
  OR2B6 consensus-c
atgaactgggtgaacgagagcatcccccaggagttcatcctgctgggctttagcgatagaccatggctggagttccctctgttcgtggtgttcctgatctcttacaccgtcacaatcttcggaaatctaacaatcatcctggtgtctagactggatagcaagctgcatacacctatgtactttttcctgactaacctgagtctgctggacctgtgttacacaaccagcacagtgcctcagatgctggtcaatctgtgcagcaccagaaaggtgatcagctacggcggctgcgtggcccagctgtttatgttcctggctctgggagccacagagtgcgtgctgctggccgtgatgagcttcgacagattcgtggccatctgcagacccctgcactacagcgtgatcatgcaccagcggctgtgcctgcaactggccgctgcttcttggatcaccggcttcagcaacagcgtgtggctgagcaccctgaccctgcagctgcctctttgcggaccttacgtgatcgaccacttcctgtgtgaagtgcccgccctgctgaagctgagctgcgtggacaccaccgccaacgaggccgaactgttcttcgtgtccgtgctgttccacctgatccctctcaccctgatcctgatctcttatgccttcatcgccagagccgtgctcagaatccagagcgccgagggcaggcagaaagccttcggcacctgtggcagccacctgatcgttgtgtccctgttttacggcaccgccattagcatgtacctgcagccacctagcccttctagcaaggaccggggcaagatggtgtccctgttctacggcatcatcgcccctatgctgaaccccctgatctacaccctgcggaacaaggaagtgaaggaggcctttaagcggctggtcgctagagtgttcctcattaagaaatga

SEQ ID NO: 669 - DNA, 939 bp, Artificial Sequence
  OR2C1 consensus-c
atggacggcgccaacgacagctctctggaaggcttcatcctgatgggcgtgtccgatcacccccaactggagatgatcttcttcatcgtgatcctttttagctatctgctgacactgctgggcaacagcaccatcatcctgctgtctagactggatgccagactgcatacacctatgtacttctttctgagcaatctgtctagcctggacctggcttttacaacaagcagcgtgccccagatgctcattaacctgtggggccctgataagacaatcagctacggcggatgtgtgacccagctgtacgtcttcctgtggctgggcgctaccgagtgcatcctgctggtggtgatggccttcgaccggtacgtggccgtgtgtagacctctgcactacaccaccatcatgaaccccagactgtgctggctgctggccgctatcgcctggctgggaggactgggcaatagcgtgatccagtccacttttaccctgcagctgcctctgtgcggccacagaagggtggacaacttcctgtgtgaagtgccagccatgatcaagctggcctgcggcgacaccagtctgaacgaggccgtgctgaatggcgtgtgcaccttcttcacagccgtgcctctgtccatcatcctgatcagctactgctacatcgcccaggccgtcctgaagatccggagcgccgagggccggagaaaggccttcaacacctgcctgtctcacctggtggttgtgctgctgttctacgggagcgccatctacggctacctgctccccgccaagaccagcaaccaggaccagggcaaattcattagcctgttctacagcgtggtcacccctatggtgaaccctctgatctataccctgcgcaacaaggaagtgaagggcgctctgagacggctgcttggaaaaggcagagaggtgggctga

SEQ ID NO: 670 - DNA, 954 bp, Artificial Sequence
  OR2F1 consensus-c
atgggcaccgataatcaaacatgggtgagtgagttcatcctgctcggcctgagcagcgattgggacacccaggtgtccctttttgtcctgttcctggtcatgtacgtggtgacagtgctgggaaattgcctgatcgttttgctgatccgcctggacagcagactgcacacccctatgtacttcttcctgaccaacctgagcctggtggacgtgtcttacgccacatctatcgttccacagctgctggctcatttcctggccgagcacaaggccatccccttccagtcttgtgccgcccagctgtttttcagcctggccctgggcggcatcgagttcgtgctgctggctgtgatggcctacgacagatacgtggccgtgtgcgaccccctgagatatagcgccatcatgcacggcgctctgtgcgccagactggccattaccagctgggtctccggctctatcaacagcctggtgcagaccaccatcacttttcagctgcctatgtgcacaaacaaattcatcgaccacatctcttgcgagctgctggccgtggtgcggctggcctgtgtggataccagcagcaacgaggtggccatcatggtgagcagcattgtgctgctgatgacccctttctgcctggtgctgctgtcctacatcagaatcatcagcacaatcctgaagatccagagccgggaaggaagaagaaaggccttccacacctgtgcctctcacctgaccgtggtggccctgtgctacggcatggccatcttcacctacatccaacctcacagctcccctagcgtgctgcaggagaagctgatcagcctgttttacgccatcctgacacctatgctgaaccccatgatctacagcctgcggaacaaggaagtgaagggcgcttggcagaaactgctgtggaagttcagcggcctgaccagcaagctggctacatga

SEQ ID NO: 671 - DNA, 954 bp, Artificial Sequence
  OR2F2 consensus-c
atggaaatcgataaccagacctgggtcagagagttcatcctgctgggcctgagcagcgattggtgcacccaggtgtccctgttcagcctgttcctggtgacctacctgatgaccgtgctgggcaactgcctgatcgtgctgctcatcagactggacagcagactgcacacaccaatgtacttcttcctgaccaatctgtctctggtcgacgtgtcttatgccacatctatcgtcccccagctgctggcccacttcctggccgagcacaaggccattcctttccagagctgcgccgcccagctgtttttcagcctggctctcggaggcatcgagtttgtgctgctggccgtgatggcctacgacagatacgtggccgtgtgcgaccccctgcggtacagcgccatcatgcacggcgccctgtgtgctagactggccattacaagctgggtgtctggcagcatcaacagcctcgtgcagaccgccatcacatttcagctgcctatgtgcacaaacaagttcattgaccacatctcctgcgagctgctggctgtggtgcggctggcatgtgtggatacaagcagcaacgaggccgctatcatggtgtcctccatcgtgctgctgatgacacccttctgcctggtgctgctgagctacatccagatcatcagcaccatcctgaagatccaaagccgggaaggcagaaagaaggccttccacacctgtgccagccacctgaccgtggtttccctgtgctacggcaccaccatcttcacctacatccaacctcacagcggaccttctgtgctgcaggagaaactgatcagcgttttctacgccatcgtgatgcctctgcttaatcctatgatctactctctgcgcaacaaggaagtgaagggcgcttggcataagctgctggaaaaatttagcggcatcaccagcaagctggccacctga

SEQ ID NO: 672 - DNA, 939 bp, Artificial Sequence
  OR2H1 consensus-c
atggtgaaccagagcagccctgtgggcttccttctcctgggattcagcgagcaccccgccctggaaagaatcctgttcgtggtggtcctgaccagctacctgctgactctggtgggcaataccctgatcatcctgctgagcgtgctggatcctcgcctgcattctccaatgtacttcttcctgtccaacctgtcttttctcgatctgtgcttcaccacaagctgcgtgccacagatgctggttaatctgtggggccctaaaaagaccatcagcttcctgggctgcagcgtgcagctgtttatcttcctgtccctgggcaccaccgagtgcatcctgctgaccgtgatggccttcgatcggtacgtggccgtttgtcagccactgcactacgccaccatcatccaccctagactgtgctggcagctggccgctgttgcttgggtcatgggcctggtgcaaagcatcgtgcaaacccctcctacactgagactgcctttctgcccccacagacagatcgacgacttcctgtgtgaagtgcccagcctgattagactgtcttgtggcgacaccacctacaacgagatccagctggctgtgtcctctgtgatctttctggtggtgcctctgagcctgattctggtctcttatggcgccatcgccagagccgtgctgcggatcaacagcgccacagcctggcggaaggccctgggaacatgcagctcccacctgacagtggtgaccctgttctacagcagcgtgatcgccgtgtacctgcagcctaagaacccctacgcccagaagagaggcaagttcttcggcctgttctacgccgtgggaacacctagcctgaaccccctgatctacaccctgaggaacaaggaagtgaagcgggcttttagaagactgctgggcaaagaccgggacagcagagagagctga

SEQ ID NO: 673 - DNA, 939 bp, Artificial Sequence
  OR2H2 consensus-c
atggtgaaccagagcagcccccccggctttctgctgctgggcttcagcgagcaccctggactggagaagatcctgtttgtggtcgtgctgacttcttatctgctgacactggttggcaataccctgattatcctgctgagcgccctggatcctagactccatagccctatgtacttcttcctgtccaacctgagcttcctggacctgtgcttcaccacatcttgcgtgccccagatgctggtcaatctgtggggccctaaaaagacaatcagctttctgggttgttctgtgcagctgtttatcttcctgagcctgggcaccaccgagtgcatccttctgaccgtgatggcctttgatagatacgtggccgtgtgtcagcctctgcactacgctacaatcattcaccccagactgtgctggcagctggcctctgtggcttgggtcatcggactggtggaaagcgtggtgcagacccctagcaccctgcacctgcctttctgcccccaccggcaggtggacgacttcgtttgtgaagtgccagccctgatccggctgagttgcggcgacaccacctacaacgagatccaaatggctgtcgcctccgtgttcatcctcgtggtgcctctgtctctgatcctggtgtcctacggcgccatcgctagagccgtgctgaggatcaacagcgccaagggcagaagaaaggccttcggcacctgcagcagccacctgacagtggtgaccctgttctacagcagcgtgatcgccgtgtacctgcaacctaagaacccttacgcccaggagagaggcaaattcttcggcctgttctacgccgtgggcacaccaagcctgaaccccctgatctacaccctgcgcaacaaggaagtgaagcgggccttcagacggctgctgggcaaggaaatgggactgacccagtcctga

SEQ ID NO: 674 - DNA, 951 bp, Artificial Sequence
  OR2K2 consensus-c
atgcagggagaaaacctgaccatttggtccttcttcttcctggaaggcttctccagatatcctggcctggaaatcgtgctgttcgtgttcagcctggtgatgtatctgatcaccctgctgggaaatagcacactgatcctgatcaccatcctggacagcagactgcagacacctatgtacctgtttctgggcaatctgagctttatggacatttgttacacctctgccagcatccccaccctgctggtcaacctcctgtcttctcagaagaccatcattttcagcggctgcgccgtgcaaatgtacctgtctctcgctatgggcagcaccgagtgcgtgctgctggctgtgatggcctacgaccggtacgtggccatctgcaaccctctgagataccccatcatcatgaacagacaggtgtgcgtgcagatggccaccgtgagctgggttacaggctgtctgacagccctgcttgagacatcctttgccctgcagatccctctgtgcggaaacctgatcgaccacttcacctgcgagatcctggctgtgctgaaactggcatgcaccagcagcctgctgatggataccatcatgctggtggtcagcgtgctcctactgccaatccccatgctgctgatctgcatctcctacgtgttcatcctgtccaccatcctgcggatcagcagcgccgagggcagaaacaaggccttcagcacctgtggcgcccatctgacagtggtgatcctgtactacggcgccgccctgagcatgtacctgaagcctagctcttctaacagccaggagatcgataagatcatcagcctgctctacggcgtgctgacccctatgctgaacccaatcatctacagcctgcgcaacaaggaagtgaaggacgccatgaaaaagctgctgggcaagatcacactgcaccagactcacgagcacctgtga

SEQ ID NO: 675 - DNA, 960 bp, Artificial Sequence
  OR2S2 consensus-c
atggaaaaggctaatgagacatcccccgtgatgggatttatcctcctgggcctgagcgcccaccctgagctggaaaaaaccttcttcgtgcttattctgctgatgtacctggtcatcctgctgggcaacggcgtgctgatcctggtgaccatcctggacagcagactgcacacacctatgtacttcttcctgggcaacctgtctttcctcgacatctgctacaccacctcctctgtgcctctggtcctcgacagcttcctgacaccacggaaaaccatctctttttctgcttgtgccgtgcagatgttcctgagcttcgccatggccggcacagagtgcgtgctgctgagcatgatggccttcgacagatatgtggccatctgcaaccccctgaggtaccccgtggtcatgagcaaggccgcttacgtgcctatggccgcctccagctgggccataggaggcgccgccagcgtggtgcacacaagcctggctatccagctgcctttctgcggagataacgtgatcaaccacttcacctgtgaaatcctggctgtgctgaagctggcctgcgccgacatctccatcaatgtgatcagcatgggcgttacaaacgtgatcttcctgggcgtgccagtgctgtttatcagctttagctacgtgttcatcatcgccaccatcctgcggatccccagcgccgagggcagaaagaaggccttcagcacctgcagcgcccatctgaccgtggtggtgattttctacggcaccctgttctttatgtacggaaaacctaagagcaaggattctctgggcgccgacaaggaggatctgtctgataagctgatccctctgttctatggcgtggtaacccctatgctgaaccctatcatctacagcctgagaaacaaggacgtgaaggctgccgtgcggaacctggttagacagaagggcttcacccaatga

SEQ ID NO: 676 - DNA, 948 bp, Artificial Sequence
  OR2V1 consensus-c
atgggaagatgggtgaaccagagctacaccgacggcttcatcctgctgggcatcttcagccattctcaaacagatctagtgctgttttccgccgtgatggtggtgttcaccgtggccctgtgcggcaatgtgctgctgatctttctgatctacatggaccctcagctgcacacccctatgtacttctttctgtctcagctgagcctgatggacctgatgctcgtgtgcaacatcgtgcctaagatggccgccaacttcctgagcggacgcaaaagcatctccttcgtgggctgtggcattcagatcggattcttcgtgtccctggtgggcagcgagggcctgctcctcggcctgatggcctacgacagatacgtggccatcagccaccccctgcactaccccattctgatgaaccagaaggtgtgcctgcagatcacaggctctagctgggcctttggaatcatcgacggcgtgatccagatggtcgcagccatgagcctgccatactgtggctctagaaacgtggatcacttcttttgtgaagtgcaggccctgctgaagctggcttgcgtggataccagcctgttcgacaccctgcttttcgcctgctgcgtgttcatgctgctgctgcccttcagcatcatcgtcgccagctatgcctgcatcctgggcgccgtgctgcggatgcggagcgcccagacctggaaaaaggccctggccacctgttcttcccacctgaccgccgtcacactgttctacggtgccgctatgttcatgtacctgagacctagacggtatagagctcctagccacgacaaggttgcttctatcttctacacagtgctgaccccaatgctgaaccctctgatctacagcctgaggaaccaagaggtgatgggcgctctgcggaagggcctgaatcactgcagaatcggcagccagcactga

SEQ ID NO: 677 - DNA, 948 bp, Artificial Sequence
  OR2V2 consensus-c
atggaaacctggctgaatcagagctctacagatgacttcatcctcctgggcattttcagccactctccaacagacctggtgctgttttctgtggtgatggttgtgttcaccgtggccctttgtggcaacgtgctgctgatttttctgatctatatggaccccagactgcacacccctatgtactttttcctgagccagctgagcctgatggatctgatgctggtctgcaccaacgtgcccaagatggccgtgaacttcctgtccggccggaaaagcatcagcttcgtgggctgtggaatccagatcggactgttcgtgtgcctggtgggaagcgagggcctgctgctgggcctgatggcctacgacagatacgtggctatcagccaccctctgcactaccccatcctgatgaaccagagagtgtgcctgcagatcgtgggcagctcttgggccttcggcatcatcgacggcctgatccagatggtggtcgtcatgaccttcccctactgcggactcagagaggtgaaccacttcttctgcgagatgctgtccctgctgaaactggcctgcgtggacaccagcctgtttgagaacgtgatcttcgcctgttgcgtgttcatgctgctgctgcctttctccatcatcgtggccagctacgccagaatcctgggcacagtgctgcagatgcacagcgcccaggcctggaagaaggccctggctacatgtagcagccatctgaccgccgtttctctgttttacggcgctgctatgttcatctacctgcggcctaggcgctatcgggcccctagccacgataaggtggtgtccatcttctacaccgtgcttacccctatgctgaatcctctgatctacagcctgagaaacagagaagtgatgggcgccctgagaaagggcctggaccggtgcagaatcggcagccaacactga

SEQ ID NO: 678 - DNA, 945 bp, Artificial Sequence
  OR2Z1 consensus-c
atgggagatgtgaaccagagcgtgacatctgacttcatcctggtgggcctgtttagccacagcggcagccaccagctgctgttcagcctggtggcagtgatgttcaccatcggcctgctgggaaacaccatcctgctgtttctgatcagagtggatagcagactgcacacccctatgtacttcctgctgagccagctgagccttctggacgtgggcttccccctggtgacaattcctaaaatggcctctgatttcctgcagggcgagggcagtatcagcttcggcggttgtgccgcccagatcttcttcctgatgctgatgggcgtggctgaaggcgtgctcctcgctctgatgagctatgacagatacgtggccgtgtgccaccccctgcagtaccccgtgctgatgaggcggcaagtgtgtctgctgatggtgggaagcagctggctggtgggcgttctgaacgccagcatccagacctccatcacactgcactttccatactgcgccagcagaatcgtggaccacttcttctgcgaggtgcctgccctgctcaagctgtcttgcgccgacaccagcgcctacgagctggccctgtctacatctggagtgctgatcctgctgctgcctctgtccctgatcgccacctcttatggccacgtgctgggcgccgtgctgagaatgcggagcgaggaagccagacacaaggccttcaccacctgcagctcccatatcaccgtggtcggccttttctacggcgccgctgtgttcatgtacatggtccctggcgcttaccacagcccccagcaggacaacgtggtgtccctgttttacagcctggtcacacctaccctgaatcctctgatctacagcctgcgcaaccgggaagtgcggatggccctggttaaggtgctgtctagagccggcctgagacaaaagtgctga

SEQ ID NO: 679 - DNA, 939 bp, Artificial Sequence
  OR2AE1 consensus-c
atgtggcagagaaaccagacaagcctggccgacttcatcctggaaggcctgttcgacgacagcctgacccacctgtttctgttcagcctgaccatggtggtctttctgatcgccgtgtccggcaataccctgaccatcttgctgatttgtgccgatcctcggctgcacacacctatgtacttcctgctgagtcagctgagcctgatggacctcatgcacgtgtctacaacaatccccaagatggctacaaactacctgtctggcaagaagtccatcagcttcgtgggctgcgccacccagcactttctgtacctgagcctgggcggcgccgagtgcctgctgctcgccctgatgtcttatgatagatatgtggctatctgccaccccctgcggtacaccgtgctgatgaaccggaaagtgggactgatgatggccgttatgagctggctgggagcttctgtgaacagcctgattcacaccgccatcctgatgcacttccccttctgcggccctagaaagatccaccacttctactgtgagttccctgccgtggtgaagctggtctgcggcgacatcacagtgtacgagacaaccgtctacatcagcagcatcctgctcctgctgctgcctatctttctggtgtccaccagctacgtgttcatcctgcattctgtgatccagatgcggagcgccggctctaaaagaaatgccttcgccacctgtagcagccacctgacagtggtgtccctgtggttcggcgcatgcatcttcagctacatgagacctagaagccagcgcacccctctgcaggacaaggtgggcagcgtgttctacagcatcatcacccctaccctgaaccccctgatctacaccctgagaaacaaggacgtggccaaggccctgcggagagtgctgggaagagatgtgatcacccaatga

SEQ ID NO: 680 - DNA, 930 bp, Artificial Sequence
  OR2AP1 consensus-c
atgaaaaacaagacagtgctgaccgagttcatcctgctgggcctcaccgacgtgccagagctgcaagtggccgtgttcacattcctgttcctggcctatctgctgtccatcatcggcaatctgaccatcctgatcctgacactgctggatagccacctgcagacccctatgtacttcttcctgcggaacttcagcttcctggagatctctttcaccaacatctttatccctagagtgctgatcagcatcaccaccggcaacaaaagcatcagcttcgccggctgttttacccagtactttttcgctatcttcctgggagccaccgagttctacctgctggccgctatgagctacgacagatacgtggccatttgtaaacctctgcactacacaaccatcatgagcagcagagtgtgcacacagctggttctgtgcagctggctggctggacttatggtgatcatcccccccatcaccctgatgtctcagcaggatttctgcgcctccaaccggctgaaccactacttctgcgactacgagccactcagggaactgagctgtagtgatacctctctgatcgagaaggtggtgttcctggtggccagcgtcacactggtcgtgaccctggtgctggtgatcctgtcttatacatttattatccggaccatcctgaagctgccttctgcccagcaaagaaccaaggccttctcaacatgcagcagccatatgatcgtgatctccctgagctacggcagctgcttcttcatgtacatcaagcctagcgccaaggaaggcgacaccttcaacaagggcgtggctctgctgatcacaagcgtggcccctctgctgaatcccttcatttacaccctgagaaaccagcaggtgaagcaggcctttaaggacatggtcaagaagctggtgaacctgtga

SEQ ID NO: 681 - DNA, 960 bp, Artificial Sequence
  OR2AT4 consensus-c
atggaagctacagcctgcaatgagagcggcagccctgtgttctacctggtgggcatccccagcctgcctgagacattctttctgcctgtgttcttcatcttcttgctgttctacctgctgatcctgatgggcaatgccctgatcctggtggctgtggttgctgaaccttctctgcacaaacctatgtacttcttcctgattaacctgtccgccctggatatcctgttcaccaccacaaccgtgcctaagatgctgtctctgttcctgctgggcgacagattcctgagcttccccgcttgtttcctgcagatgtacctgttccacagctttacatgcagcgaggccttcatcctggtggtgatggcctacgaccggtacgtggccatctgcagacctctgcactaccccgtgctgatgaccccacagacaaacgccgctctggctgcctctgcctggctgaccgccctgctgctgcccatccctgccgtggtgcagaccagccagatggcctttaacagcatcgcctacatctaccactgcttttgcgaccacctggccgtggtccaggcctcctgctctgatacaacccctcaaaccctgatgggattttgtatcgccatggtggtgtccttcctgccactgctcctggtcctgctctcctacgcccacatcctggccagcgtgctgagaatcagctctagagagggcagaagcaaggccttcagcacctgcagcagccacctgctggtggtcggcacctactacagctctatcgccatcgcatatgtggcctatagggccgacctgcctctggacttccatatcatgggcaacgtggtgtacgccattttgacacctatcctcaaccccctgatctacaccctgcggaacaaggacgtgaaggccgccatcaccaagatcatgagccaggaccccggatgtgatcggagcatcctgtga

SEQ ID NO: 682 - DNA, 948 bp, Artificial Sequence
  OR3A1 consensus-c
atgcagcctgagagcggcgccaacggcaccgccgttacagagttcatcctgctcggactcgtggaaacccctggcctgcaacctgtggtctttgtgctcttcctgttcgcatacctggttacagtgggcggcaacctgagcattctggccgccatcctggtggaacccaagctgcacaccccaatgtacttcttcctgggcaatctgtccgtgctggatgtgggctgcatcaccgtgacagtccccagcatgctgtctagactgctgagccataagagaaccgtgccatacggcgcttgtctgacccagctgtttttcttccacctgctggtgggagtggactgcttcctgctgacagccatggcctacgatagattcctggccatctgcagacctctgacctactccacaaggatgagccagacagtgcagcggatcctggtggccgtgtcctgggcctgtgccttcaccaacgccctgacccacacggttgctatttctaccctgaatttctgcggtcctaacgtgatcaatcacttctactgcgacctgcctcagctctttcagctgtcatgcagcagcacacagctgaacgagctgctgctgttcgccgtgggatttatcatggccggcacccctatggccctgatcgtgacctcttatatccacgtggccgctgctgtgctgagaatccggagcgccgagggccgcaaaaaggccttcagcacctgtggctctcacctgaccgtggtggccatcttctacggaagcggcatcttcaactacatgcggctgggcagcacaaagctgagcgacaaggacaaagccgtgggcatctttaacaccgtcatcaaccccatgctgaaccctatcatctacagccttagaaaccccgacgtgcagggcgccctgtggcgggtgctgaccggcagaagaagcctggcttga

SEQ ID NO: 683 - DNA, 948 bp, Artificial Sequence
  OR3A3 consensus-d
atggaacctgaggccggcaccaaccggacagccgtgaccgagttcatcctgctcggcctggtggaaaccgaggaactgcagagcgtcgtgttcgtgctgtttctgttcgcctatctggtcacagtgggcggaaatctgtccatcctggctgcaatcctggtggaacccaagctgcacacacctatgtacttcttcctgggcaacctgtctgtgttggatgtgggatgtatcaccgtgaccgttcctgccatgctgggaaggctgctgtctcacaaaagaacaatcagctacgatgcctgtctgtctcagctgttcttcttccacctgctggctggcatggattgcttcctgctgaccgccatggcttacgacagattcctggccatctgcagacctctgacatacagcacaagaatgagccagaccgtgcaaagaatgctggtcgccgtcagctgggcctgcgccttcaccaatgccctgacccacaccatcgccctgaccaccctgaacttctgcggccctaacgaggtgaaccacttctactgcgacctgcctcagctttttcagctgagctgcagctctacacagctgaacgagctgctcctgtttgccgctggattttttatggccggcgcccctctggtgctgattatcgtgtcctacgcccatgtggccgctgctgtgctgagaatccggagcgtggagggcagaaagaaggccttcagcacctgtggctcccacctgaccgtggtgtgcctgttctacggcacaggcatcttcaactacatgagactgggcagcgaggaagccagcgacaaggacaagggcgtgggcgtgttcaacactgtgatcaaccccatgctgaatccactgatctacagcctgcggaaccccgacgtgcagggcgccctgtggcgggtgctggtgggccgcagaagcctgacctga

SEQ ID NO: 684 - DNA, 948 bp, Artificial Sequence
  OR4A5 consensus-c
atgggccaaagcaacaacgtgacagagttcgtgctgcttggcctgacacaggatcctggcggacagaaggccctgtttgttatgttcctgctgatctacatcgtgacaatggtcggcaacctgctgatcgtggtgaccgtgatcgcttctccaagcctgggcagccctatgtatttcttcctcgcctgcctgtctctgatggacgccgtgtacagcaccaccatctccccaaagctgatcgtggacctgctgtgcgacaagaaaaccatcagcttccaggcctgcatgggacagctgttcatcgagcacctgttcggcggcgccgaggtgttcctgctggtggtgatggcctacgacagatacgtggctatctgtaaacctctgcactacctgaccatcatgaatagacaggtgtgtatcctgctgctggtggtagcctggatcggcggatttgtgcacagcgtggtccagatcctgttcgtgtattctctgcctttctgcggccctaacgtgatcgatcatttcagctgcgatatgtaccccctgctggaactcgcttgtacagacacctacttcattggactgaccgtggtggccaacggcggcgccatctgcatggtgatctttatcctgctgctgatcagctacggcgtgatcctgaatagcctgaagacccacagccaggagggcagacggaaggccctgtccacctgtagctctcacatcaccgtggtggtcctgtttttcgtgccctgcatcttcatgtacgtgcggcctgtgtccaacttccccatcgacaagttcatgaccgtgttttacacggtgattacccctatgctgaaccccctgatctacacactgagaaacagcgagatgaagaacgccatggaaaagctgtggtgcaaaaagctgacaatcttcatcatcggcggcgtcagcgtgctgtga

SEQ ID NO: 685 - DNA, 936 bp, Artificial Sequence
  OR4A15 consensus-c
atggaaaacagaaacaacgtgaccgagttcgtgctgctgggcctgacccagaatcctgagggccagaaggtgctgtttgtgaccttcctgctgatctatatcgtgacaatcatgggcaacctgctcattatcgtgaccatcatggccagccagagcctgggctctcctatgtacttcttcctggcttacctgagcttcatcgacgccgtgtacagcaccgccatcgcccctaagatgatcgtggacctgctgtacgagaagaagaccatcagctttcaggcctgcatgacacaagtgttcatcgatcacctgttcgccggagctgaagtgatcctgctggtggtcatggcttacgacagatacgtggccatctgtaaacctctgcactacctgatcatcatgaaccggagagtgtgcgtgctgatgctgctggccgcctggatcggcggatttctccacagcctggtccagttcctgttcatctaccagctgcctttctgcggacctaatgtgatcgacaacttcctgtgcgacatgtaccccctgcttaaactggcttgtacaaacacctacctgatcggcctgtccatgatcgccaacggcggcgccatctgcaccgtgatcttcttcattctgctgctctcttacggcgtgatcctgcatagcctgaagacccacagcctggaaggcaagcggaaggccctgtatacctgcgcctctcacatcaccgtggtgatcctgttcttcgtgccatgtatctttctgtacgctagacccaacagcacattccccatcgataagagcatgactgttgtcctgacatttattacacctatgctgaaccccctgatctacaccctgagaaatgccgagatgaagaacgccatgcggaagctgtggtccaagaaagtgtccctggccggcaaatggctgtga

SEQ ID NO: 686 - DNA, 930 bp, Artificial Sequence
  OR4A47 consensus-c
atggaaccccggaacaacgtgacctacttcgtgctgctcggcctgacacagaaccccaaggaacagaaggtgctgttcgtgatgttcctgctgttttacatcctgaccatggtgggaaatctgctgatcgtggtcaccgtgacagtttccaagaccctgggctctcctatgtacttcttcctggccagcctgagcttcatggacgtgatctacagctcttctatcagccctagactgatctctgatctgttcttcggcgagaacaccatctcttttcagagctgcatgacacaactgttcaccgagcacttcttcggaggctctgaggtgttcctgctgctggtgatggcctacgacagatacgttgctatctgcaagcccctgcactacctggtgatcatgcggcagtgggtgtgcgtggtgctgctcgtggtgtcctgggtcggcggcttcctgcactccgtgatccagctgagcacaatctatggcctgcctttctgcggccctaacgtgatcgaccactttttttgcgacatgtatcctctgctgaagctggtgtgtacagacacctacgtgattggattgctggtggtggctaatggcggactgatttgtaccatcgtgttcctgctgctgctgatcagctacggcgtgatcctgcatagcctgaaaaacctgtcccaggagggcagaagaaaggccctgcagacatgcggcagccacatcaccgtggtggtctttttctttgtgccatgtatcttcatgtacgccagacctgccaagaccttccccatcgataagagcctgagcgtgttctacaccgtgatcacacctatgctgaacccactgatctacaccctgagaaacagcgaaatgaccaacgccatgaaaaagctgtggcggcgcgatctgatcagcagcagcacctga

SEQ ID NO: 687 - DNA, 930 bp, Artificial Sequence
  OR4B1 consensus-c
atggcctctacaaacaacgtgaccgagctgatcatcaccggcctgtttcaggatcctgaggtgcagagagtgtgcttcgtggtctttctgcctgtgtacctggctacagtggtgggcaacggcctgatcgtgctgaccgtgtccgtgtccaaaagcctggatagccctatgtacttttttctcagctacctgagcctggtggaaatcagctatagcagcaccgtggtccccaagttcatcaccgacctgctggcaaagatcaagaccatcagcctggagggctgtctggcccagatcttcttcttccacttcttcggcgtcaccgagatcctgctgctggtggtgatggcctacgacagatacgtggccatctgcaagcctctgcactacatgaacatcatgagcagacagctgtgtcacctgctcgtggctggcagctggctgggcggcttctgccattctatcatccagatcctgattaccatccaactgccattctgcggccctaacgtgatcgaccactacttctgtgacctgcagcctctgttcaagctggcctgcaccgatacattcgtcgaaggcgtgatcgtgctggctaattctggactgatttccgtgttcagcttcctgatcctggtttcttcttatatcgtgatcctggtgaacctgagaaatcactccgccgaaggaagacggaaggccctgagcacatgcgccagccacatcactgtagtgatcctgttctttggccccgccattttcctgtacatgagacccagcagcaccttcaccgaggacaagctggtggccgtgttctacaccgtgatcacacctatgctgaaccccatcatctacacactgcgcaacgccgaggtgaaaatcgccatgcggcggctgtggggcaagaaggaaaacagcggcagagagtga

SEQ ID NO: 688 - DNA, 909 bp, Artificial Sequence
  OR4C3 consensus-c
atggaaatcccccacaatatcacagagttctttatgctcggcctgtctcagaaccccgaggtgcagagagtgctgtttgtggtgttcctgatcatctacgtggtcaccgtgtgcggcaacatgctgatcgttgtgaccattaccagctccccaacactggccagccccatgtacttcttcctggctaatctgtcattcatcgacacctgctactcttccagcatggctcctaagctgatcgctgacagcctgtatgagggcaggaccatcagctacgagggatgtatggcccagctgttcggcgcccacttcctgggcggcgtggaaatcatcctgctgacagtgatggcctatgatagatacgtggccatctgcaagcctctgcactacaccacaatcatgaccagacacctgtgcgccctgctggtgggtgttgcctggctgggcggcttcctgcatagcctggtccaactgctgcttgtgctgcagctgcctttctgcggccctaacgtgatcaaccactttgtgtgcgacctgtaccccctgctggaactggcctgcaccaacacctacgtgatcggactgctcgtggtggccaacagcggcgtgatttgtctgttaaatttcctcatgctggctgcttcttacatcgtgatcctgtacagcctgagaagccacagcgccgagggccggagaaaggccctgtctacctgtggagcccacttcaccgtggtcgccctgttcttcgtgccttgcatcttcacatacatgcggcctagcagcacactgagcatcgataagaacatggccgtgttctacggcatcctgacaccaatgctgaaccctctgatctacaccctgcggaacgaggaagtgaagaacgccatgagaaaactgtttacctggtga

SEQ ID NO: 689 - DNA, 924 bp, Artificial Sequence
  OR4C6 consensus-c
atggaaaaccagaacaacgtgaccgagttcatcctgctcggcatcacagagaaccccgagctgagaaagatcttcagcgccgtgttcctgatcatgtacgtggctacagtgctgggcaacctgctgatcgtggtcaccatcattacaagccagagcctgcggagccctatgtacttcttcctgacaagcctttccctgctggacgtgacctacagcagcgtgatcgcccctaagatgatcgtggacagcctgtccgagagcaccaccatcagcctggaaggctgtatgacccaactgttcgccgaacatttcttcggcggagtgggcatcatcctgctgatcgtgatggcctacgatagatacgtggctatctgcaagcctctgcactacatgaccatcatgagccccagagtgtgctgcctgctgctgggcggcgcctgggtcggcggatttatgcacgccaccatccagctgctgttcatgtatcagatccccttctgcggccctaatgtgatcgaccacttcatgtgcgacctgttcccactgctgaaactggcttgtatggacacccacatcctgggcctgctcgtaatcctgaacagcggcgtgatgtgcgtggccatcttcctgattctgattgcctcttatgtggtcatcctgtgcagcctgaagagctactctagcgagggcagaagaaaggccctgtctacatgcggatctcacctgaccgtggtggtgctgttttttgtgccatgtatctttctgtacgtgcggcctgtggtgacctaccccatcgataaggccatggctgtgtccgatacaatcgttacccctatgctgaaccctctgatctacaccctgcgcaacgccgaggtgaagaacgccatgcggaagctgtggatgaaatgggaagccctgaagtga

SEQ ID NO: 690 - DNA, 933 bp, Artificial Sequence
  OR4C11 consensus-c
atgcagcagaacaacagcgtgaccgagtttatcctgctgggactcacacaggatcctctgagacaaaagatggtgttcgtcattttcttcatcttctacatgggaacagtggtgggcaacctgctgatcatcgtgacaatcaagtcctctagaaccctgggcagccctatgtacttcttcctgttctacctgtctctggccgacagctgcttcagcacatctaccgccccacggctgatcgttgatgccctgagcgccaagaagatcatcagctataacgagtgcatgacccaggttttcgccctgcacctgttcggctgtatggaaatctttgtgctgatcctcatggccgtggatagatacgtggctatctgtaaacctctgcgctaccctaccatcatgagaagacaggtgtgcatcatcctgatcgtgctggcttggatcggcagcttcatccacagcatcgcccagattatacttgccctgcggctgcctttctgcggccctaatctgatcgaccactactgctgcgacctgcagcctctgctgaagctggcttgcatggacacctacatgatcaacctcctgctggtgtccaacagcggcgccatctgcagctcttcctttgtgatcctgatgatcagctacatcgtgatcctgcattccctgagaaatcactctgccgagggcagaaagaaagccctgagcacctgtaccagccacatcatcgtggtgatcctgtttttcggcccctgtatcttcatctataccagaccccccaccaccttccccatggacaagatggtcgccgtgttctacaccatcggaaccccttttctgaacccactgatctacacactgcggaatgctgaagtgaagaacgccatgcggaagctgtggcacatcaaaattacaagcgagaacaagggctga

SEQ ID NO: 691 - DNA, 927 bp, Artificial Sequence
  OR4C12 consensus-c
atggaaaacaagagaaatgtgaccgagttcatcctgatcggcctgacacagaacccaatcatgcagaaagtggtcttcgtggttttcctggtcctgtacatggtcaccctgtccggcaacctgctgatcgtggtgacaatcacaaccagccaggccctgagcagccccatgtacttctttctgacccatctgagcctgatcgataccatctatagctcttctagcgcccctaagctgatcgtggacagcctgcaagagaagaagattatcagcttcaacggatgcatggcccaggtgtacgccgagcacatcttcggcgctacagagatcatcctgctgacagtgatggcctacgatagatacgtggccatctgcaagcctctgcactacaccaccatcatgagccacagcctgtgtattctgctcgtgggcgtggcctggacaggcggattcctgcacgccaccatccagatcctgttcaccgtctggctgcccttctgcggccctaacgtgatcgaccacttcatgtgcgacctgtaccccctgctgaagttagtgtgcatggacacccacaccctgggcctgttcgtggctgccaattctggctttatctgtctgctgaacttcctgctgcttatggtgtcctatgtggtgatcctgcgctccctgaagaactacagcctggaaggcagacggaaagccctgagcacatgcgtgtctcacatcaccgtggtggttctgttcttcgtgccttgtatctttgtgtacctgagacctgtgaccaccctgcctatcgataaggccgtggctgtgttttacacaatggtggccccaatgctgaatcctctgatctacaccctgcggaacgctgaagtgaagaacgccatgagaaagctctggcggaagaaagtgaccagcgacaactga

SEQ ID NO: 692 - DNA, 933 bp, Artificial Sequence
  OR4C16 consensus-c
atgcagctgaacaacaacgtgaccgagttcatcctgctgggcctgacccaggaccccttcagaaagaagatcgtgttcgtgatcttcctgctgttttacctgggcacactgctcggaaatctgctgatcatcacaacaattaagaccagccaggccctgggcagccccatgtacttcttcctgttctacctgagcctgtccgatacatgcttcagcacatctatcgccccacggatgatcgtggacgccctgctgaagaagacaaccatcagcttcagcgagtgcatcatccaggtgttcagcttccacttctttggctgcctggaaatcttcatcctgatcctgatggccgtggatagatacgtggctatctgtaaacctctgcattacatgaccatcatgagccaaagagtgtgcggcgtgctggtcgccgtggcttgggtcggaagctgcgtgcactctctggcccagatttttctggccctgagcctgcctttctgtggccccaacgtgatcgaccactacttctgcgacctgcagcctctgctcaagctggcatgctctgatacctacgtcgtgaacctgctgcttgtgtccaacagcggagccatctgcaccgtgtcttttgtgatgctgatgttcagctacgttatcatcctgcacagcctgagaaaccacagcgccgaaggcagaagaaaggctctgtctacctgtatcagccacatcattgtggtgatcctcttctttggcccttgtatcttcatctacacaagacctgccaccaccttccccatggacaagatgatcgccgtgttttacaccgtgggcacccctctgctgaatcctctgatctataccctgaggaacgccgaggtgaagaacgccatgcggaaactgtggtccaagaaactgatcagcgacgacaagcggtga

SEQ ID NO: 693 - DNA, 930 bp, Artificial Sequence
  OR4C46 consensus-c
atggaaaacagaaacaacgtgaccgagttcgtgctgctgggcctgaccgaaaatcccaagatgcagaagatcatcttcgtggtctttttcgtgatctacatcatctccgtggttggcaacgtgctgatcgtggtgaccatcaccgccagccccctgctgggatctcctatgtacttcttcctggcctacctgagcttcattgatgcctgttacagcagcgtgaacacacctaagctgatcaccgatagcctgtacgagaagaagaccatcctgttcaacggctgcatgacccagatcttcggcgagcacttctttggcggcgccgaggtgatcctgttgacagtgatggcctatgatagatacgtggctatttgtaaacctctgcattacacaaccatcatgaaccggagagtgtgcggcctgctcatgggcgtggtgtgggtcggaggatttctgcacgccacaatccagatcctgtttatcttccaactgcctttctgcggacctaacgtgattgaccacttcatgtgcgacctgaaccccctcctgaacctggcctgcacggacacccacaccctgggcctgttcgttgctgccaacagcggcttcatctgcctgctgaatttcctgctgctgatggtgtcctatgtggtgatcctgcggagcctgaggaatcacagcctggaagccagacggaaagccctgtccacctgcgtgtctcacatcaccgtggtggtcctgttcttcgtgccatgtatctttgtgtacatgagacctgccgctacactgtctatcgacaaggccgtggctgtgttctacaccatgatcacacccatgctgaatcctcttatctacacactgagaaacgcccagatgaaaaacgccatccggaagctgtgcagcagaaaggacatcagcggcgacaagtga

SEQ ID NO: 694 - DNA, 936 bp, Artificial Sequence
  OR4D1 consensus-c
atggaacctcaaaacacaacctgggtgagcgagttcgtgctgctgggattcagccaaacccaggagctgcagaaatttctgtttctggtgtttctgttcgtgtacgtgaccaccgtggtaggcaacctgctgatcatggtgacagtgacattcgacagcagactccacacccccatgtacttcctgctgcggaacctggccgtgatcgacctgtgctactcaacagtcaccagccctaagatgctggtggacttcttccacgaaacaaagaccatctcttaccagggatgtatggcccagatcttctttttccatctgctgggcggaggcaccgtgttcttcctgagcgtgatggcctacgataggtacatcgccatcagccggcctctgcactatgtgacgatcatgaacacccggctgtgtgtgggcctggtggtcgccgcttgggtcggcggcttcgtgcactctatcgtgcagctggctctgatgcttccactgcctttttgcggccctaatgtgctggataacttctactgcgacgtgccccaggtgctgagattggcatgcacagatacaagcctgctggagttcctgatgatctctaatagcggcatgttggtgctgatttggttcctgctgctgctcatcagctacaccgtgatcctggtgatgctccggagccacagcggccaggccagacgcaaggccgcttctacatgcaccacccacatcatcgtggtgtccatgatcttcatcccttgtatctacatctactccagacccttcaccccattccctatggacaaggccgtgtccatcagctataccgttatgacccctatgctgaaccccatgatttacaccctgagaaaccaggagatgcaggccgccatgaaaagactgggcaagtgcctggttatctgcagaagagagtga

SEQ ID NO: 695 - DNA, 936 bp, Artificial Sequence
  OR4D2 consensus-c
atggaacccggcaatctgacatgggtctccgagttcgtgtttctgggcctgtctcagaccagagaactgcaactgtttctctttctggtgttcctgttcgtgtacaccaccacagtgatgggcaacctgctgatcatcgtgaccgtgacatctgatagcagactgcacacccctatgtacttcctgctgcggaatctggccgtgctggacctgtgcttcagctctgtgaccgccccaaagatgctggtcgacttcctgtctgagaagaaaaccatcagctatcagggctgcatggcccaaatcttcttcttccacttcctgggaggcgccatggtcttcttcctcagcgtgatggcctacgacagactggtggccatcagccggcccctgcactacgtgacaatcatgaacacccagctgtgtgtgggcctggtggttgctgcctgggtgggcggatttgtgcacagcatcgtgcagctggccctgatgctgcctctgcctttctgcggccctaacgtgctggacaacttctactgcgacgtgccccaggtgctgaggctggcatgcactgataccagcctgctggagttcctgatgatcagcaacagcggaatgctggatgtgatctggttctttctcctgctgatgagctacagcgtgatcctggtgatgctgcggagccattcaggccaggccagaagaaaggccgctagcacctgcaccacccacatcattgtggtgtccatggtgttcatccctagcatctacctgtacgccagacctttcaccccattcagcatggacaaggccgtgtccatttctcacaccgtgatgacacctatgctgaaccccatgatctacacactgcggaaccaggagatgcaggccgctgttaagcggctgggcagacacagactggtctgtaaaagagagtga

SEQ ID NO: 696 - DNA, 936 bp, Artificial Sequence
  OR4D9 consensus-c
atggaccagggcaactacaccagagtgaaggagttcatctttctgggcatcacccaatctcgggaactgagctgggtcctcttcacattcctgttcctggtgtacatgacaaccctgatgggcaatctgctgatcatggtgaccgtcacatgcgagagccatctgcacacccctatgtacttcctgctgaggaacctgagcgtgttagatatctgcttctctagcatcacagctcctaaggtgctcgtggacctgctgtctgagagaaagaccatctccttcaacggctgcgtgacccagatgttcttctttcacctgctgggcggagccgacgtgttctctctgtccgtgatggccttcgacagatacatcgccatcagcaagcccctgcactacatgaccatcatgagcagaggaagatgcaccgccctgatcgtggccagctgggtgggcggcttcgtgcacagcatcgtgcagatcagcctgctgctgccactgcccttctgcggccctaatgtgctggatacattctactgcgacgtgccccaggttctgaagctggcttgtacagatacatttacactggaactgctcatgatttccaacaacggcctggtctcctggttcatcttcttcttcctgctggtgtcttataccgtgatcctgatgatgctgagaagccacacaggcgagggcagaagaaaggccattagcacctgtaccagccacatcaccgtggtgaccctgcacttcgtgccatgtatctacgtgtacgccagaccttttacagctctgcctaccgacaccgccatcagcgtgacctttaccgttatcagccctctgctgaaccctatgatctacaccctgcggaaccaggagatgaaaagcgccatgcggagactgaaaaagcggctgggacagagcgagcggatctga

SEQ ID NO: 697 - DNA, 936 bp, Artificial Sequence
  OR4D11 consensus-c
atggaactgggcaatgtgacccgggtgaaggagttcatcttcttgggactgacccaatctcaggacctgtctctggttctgttcctgtttctgtgcctggtctacatgacaaccctgctgggcaacctgctgatcatggtgaccgtcacatgtgagagcagacttcacacacctatgtacttcctgctgagaaacctggccatcctggacatttgcttcagcagcatcaccgcccctaaggtgctggtggacctgctgagcaagaagaaaaccatcagctacaccagctgcatgacccagatgttctttttccacctgctcggaggcgccgatatcttctctctgagcgtgatggccttcgacagatacatggccatctctaagcccctgcactacgtgaccatcatgagccgcggccggtgcaccgctctgatcgttgcttcttgggtcggaggcttcgtgcacagcatcgtgcagatctccctgctgctgcctctgccattttgcggccccaacgtgctggataccttctactgcgacgtgccccaggtgctgaaactggcctgcaccgacaccttcgccctggaactgctgatgatcagcaacaacggcctggtgaccaccctgtggttcattttcctgctggtgtcctacaccgtgatcctgatgatgctgagaagccaggccggcgagggcagaaggaaggccatcagcacctgtacaagccacatcacagtggtgacactgcatttcgtgccttgtatctatgtgtacgccagaccttttaccgctctgccaacagataaggccatctccgtgacattcaccgtgatcagccctctgctcaatcctctgatctacacactgcggaaccaggagatgaaaagcgccatgagaagactgaagcggagactggtgcccagcgagcgggaatga

SEQ ID NO: 698 - DNA, 918 bp, Artificial Sequence
  OR4F17 consensus-c
atggtgacagagttcatcttcctgggcctgagcaactctcaaggcctgcagatcttcctgttcgtgttcttcttcgtgttctacgtgggcatcgttttcggaaatctgctgatcgtgatcaccgtggtgtccgatagccacctgcacagccctatgtacttcctgttggccaacctgtctctgatcgacctctgtctgagttctgtgaccgcccctaagatgatcacagatttcttcagcaaaagaaaggtgatcagctttaagggctgcctggcccagatcttcctgctgcatttcttcggaggcagcgagctggtgatcctgatcgccatggccttcgaccggtacgtggccatctgcaagcccctgcactacaccacaattatgtgcggcaatgtgtgtgtgggaatcgtggccgctgcctggggcataggcttcctgcactctgtcagccagctggcttttgccgtgaacctgcccttctgcggccctaacgaagtggacagcttctactgcgacctgcctagagtgatcaaactggcctgcaccgacacctacagactggatatcatggtcatcgcaaactccggcgtgctgaccgtgtgcagcttcgtgctgcttattattagctacaccatcatcctgatgaccatccagcacagacctagcgacagaagcagcaaggccctgtctacactgacagcccacatcaccgtggtcctgctgttttttggcccctgtatctttatctacgcctggcctttcccaatcaagagcctggataagttcctggctgtgttttacagcgtggtgactcctctgctgaaccccatcatctataccctgcggaacaaggacatgaaaaccgccatgcggcagctccgcaagtggaacgtgaacagcagagtgaagtcctga

SEQ ID NO: 699 - DNA, 939 bp, Artificial Sequence
  OR4F21 consensus-c
atggacggcgagaaccactccgtcgtgtctgagttcgtgttcctgggtctgaccaacagctgggagatccagctgctcctgctggtctttagcagcgtgctgtacgtggcctctatgaccggcaacatctttatcgtgttcagcgtcaccaccgacccccacctgcacagccctatgtacttcctgctggctaatctgagcttcatcgacctgggcgcctgcagcgtgaccagccccaagatgatctacgacctgtttcggaagcacaaggtgatctccttcggcggctgtatcgcccaaatcttcttcatccacgtgattggaggagtggaaatggtgctgctgatcgccatggcctttgatagatacgtggccatctgtaaacctctgcactacctgaccatcatgagcccaagaatgtgcatcctgtttctggctgctgcctggaccctgggcgtgtcccacagcctgttccagctggccttcatcgttaacttgcccttctgcggccctaacgtgctggacagcttctactgcgacctgcctcgcctgcttagactggcctgtaccgatacataccggctgcagttcatggtgaccgtgaacagcggcttcatctgcgtgggctcttttttcattctgctgatctcttacgtgttcatcctgttcaccgtgtggaagcactcttcaggcggcagcagcaaggccctgagcaccctgtccgcccacatcacagtggtgctgctcttctttggacctacaatgttcgtgtacacatggcctcatcctaatagccagatggataagttcctggctctgttcgacgccgtgctgacacctttcctcaaccccgtgatctatacattccggaacaaggaaatgaaagccgccatgaagagagtgtgcagacagctggtgatctacagaaagatcagctga

SEQ ID NO: 700 - DNA, 930 bp, Artificial Sequence
  OR4P4 consensus-c
atggaaaagcggaacaacgtgacagtgttcatcctgctgggcctgtctcagaacaagaacatcgagattctgtgttttgtgctgttcctgttctgctacatcgctatctggatgggcaacctgctgatcatgatctccatcacctgtagccaactgatccaccagcctatgtacttctttctgaactacctgagcctgtccgatctgtgctacaccagcaccgtgaccccaaagctgatgaccgacctgctggccgagagaaagacaatcagctacaacaactgcatgacccagctgttcaccacccatttcttcggcggcatcgagatcttcatcctcaccggcatggcctatgatagatacgtggccatctgcaagcctctccactacaccatcatcatgagcagacagcggtgcaacaccatcatcatcgcctgttgtaccggcggatttatccacagcgccagccagttcctgctgaccattttccttcctttctgcggccctaatgagatcgaccactacttttgcgacgtgtaccccctgctgaaactggcctgcacagacacccacatgataggactgctcgtcatcgccaacagcggcctgatcgccctggtgaccttcgtggtgctgatgctgtcttatttctttattctgtacacaatccgggcctacagcgctgaatccagaagcaaggccctgtctacctgctctagccacgtgacagtggttgtcctgttcttcgctccagccctgttcatctacatcagacctgccaccacattccccgaggacaaggtgttcgccctgttttacacaatcatcgctcctatgttcaaccccctgatctacacactgagaaatacagaaatgaaaaatgccatgcgcaaagtgtggtgctgccagatcctgctgaagagaaagtga

SEQ ID NO: 701 - DNA, 927 bp, Artificial Sequence
  OR4X1 consensus-c
atggctgccacaagcaacgtgaccgaaatcatcttcctgggcttcagccaaaattggagcgtccagaaggtgatctctgtgatgttcctgctgatgtacaccgccatcgtcctcggaaatggcctgattgtggtgaccatcatggcctcaaagggcctgaccagcccaatgtacttcttcctgagctatctgtctttcgtggaaatctgctactgcagcgtgaccgcccctaagctgatcttcgacagcttcatcgagcggaaagtgatcagcctgaaaggttgtatcacacagatcttcttcctgcacttcttcggcggcaccgagatctttctgctgaccgtgatggcctacgatagatacgtggccatctgtaaacctctgcattacacagccatcatgaacagaagagtgtgcggactgctggtgggcgccgcctggggcggaggcctgcttcacagcgtgggccagaccttcctcatttttcagctgcccttctgcggccctaacatcatcgaccactacttctgcgacgtgcaccccgtgctgaagctggcctgctccgacaccttcctgatcggactgctgatcattaccaacggcggcagcatcagcgtggtgtccttttttgtgctgctggcttcttatgtggttatcctgcactccctgagacacacatctgagggcagaaggaaggccctgagcacctgcgccagccacgtggccgtggtaggcctgttctttatcccttgttctttcgtgtacatgagaccctgcgtgaccctgcctgctgataagatcgtggctgttttctacacagtggtgacacctctgctgaacccagtgatctacagcttccggaacgccgaggtgaagaacgccatgcggcggctgatgggcagaaaggtgatctgggaggaaaagtga

SEQ ID NO: 702 - DNA, 930 bp, Artificial Sequence
  OR4X2 consensus-c
atggctaatacccacaacgtgaccgagttcatcttcctcggactgtctccaaaccaggaggtgcaaagagtgtgcttcgtgatcttcctgctgctgtacaccgccatcgtgctgggcaacttcctgatcgtgcttacagtgatgaccagccggagcctgggcagccctatgtacttctttctgtcctacctgagcttcgtggaaatctgctactctagcaccacagcccccaagctgattagcgatctgctggccgagagaaaggccatcagcctgtggggttgtatgacacagctgttcttcctccatttcttcggcggaaccgagatctttctgctgaccgtcatggcctacgacagatacgtggctatctgcaagcctctgagctacaccaccatcatgaaccggcaggtgtgcgccgtgctggtgggcatcgcctgggttggcggcttcgtccactcctttgcccagatcctgctgatcttccacctgcctttctgtggccctaatgtcatcgaccactacttctgcgacgtgctgcccctgctgaagctggcctgttctgataccttcctgatcggcctgctgatcgtggccaacggcggaacactgagcgtgattagcttcgtggtgctgctggcttcttatgtggtgatcctcctgcacctgcggaccagaagcagcgagggcagacggaaggccctgagcacatgcggctcccacatcaccgttgtgatcctgtttttcggcccctgcatctttatctatctgcgccctagcacaaccctgcctgtggacaagatggtggccgtgttctacacagtgatcacccctctgctgaaccccgtgatctacagcctgagaaacgccgaagtgaagaaggctatgaaaagactgtggatcagaaccatgaaactgaacgagaagtga

SEQ ID NO: 703 - DNA, 936 bp, Artificial Sequence
  OR5B2 consensus-c
atggaaaactgcacagaggtcacaaagttcatcctgctcggcctgacaagcgcccctgagctgcaaatccccctgttcatcctgttcaccctgatctacctgatcaccgtgtgcggcaacctgggcatgatcctgctgatcctgctggacagctgtctgcatacacctatgtacttcttcctgagcaatctgtccctggtcgacttcggctacagctccgccgtgacccctaaggtgatggccggcctactgcggggcgataaggtgatcagctacaacgcctgcgccgctcagatgttcttcttcgtggcctttgctacagttgaaaattacctgctggccagcatggcctacgatagatacgccgccgtgtgcaagcctctgcactataccacaaccatgaccaccagcgtgtgcgcctgtctggctatcggcagctacgtgtgtggcttcctgaacgcctcttttcacgtgggagatatcttctccctgagcttttgcaaaagcaacctggtgcaccacttcttttgcgacgtgccagccgtgatggccctgtcttgtagcgacaagcacaccagcgaggtgatcttggtcttcatgagcagtttcaacgtgttctttgcactgctcgtgatcctgatctcttatctgttcatcttcattaccatcctgaagatgcacagcgcccagggacaccagaaagccctgtcaacatgcgcctctcacctgaccgccgtgtctatcttctacggcaccgtgatttttatgtacctgcagcccagctccagccacagcatggacaccgacaagatggcttctgtgttctacgccatggtgatccctatgctgaaccccgtggtgtacagcctgagaaacaaggaagttaagaacgctttcaagaaagtggtggagaaggccaagttcagccttggatga

SEQ ID NO: 704 - DNA, 945 bp, Artificial Sequence
  OR5B12 consensus-c
atggaaaatagcacagaggtgaccgagttcatcctggtgggcctgaccgacgaccccgagctgcaaatccccctgtttatcgtgttcttactgatctacctgatcacactggtgggcaatctgggcatgatcgagctgatcctgcttgatagcagactgcacacaccaatgtacttcttcctgtccaacctgagcctggtcgacttcggctacagctctgccgtgacccctaaggtgatggccggcttcctgacaggagataagttcatctcctacaacgcctgtgctacacagttcttcttctttgtggccttcattaccgtggaaagcttcctgctggccagcatggcttacgacagatacgcagctgtgtgtaaacctctgcactatacaaccacaatgaccaccaacgtgtgcgcctgcctggccatcggcagctatgtgtgcggctttctgaatgcctctatccacaccggcaacatcttccggctgtctttttgtagaagcaacgtggtggatcacttcttctgcgacgcccctcctctgctggccctgtcatgcagcgacaactacatcagcgagatggtgatcttcttcgtggtcggcttcaacgacctgttctccatcctggtgatcctgattagctacctgttcatctttatcaccatcctcaagatgcggagctctgagggcagacagaaagccttcagcacctgcgccagccatctgaccgccgtgtctatcttctacggaaccggcatcttcatgtacctccagcctagcagcagccacagcatgggcacagataagatggctagcgtgttctacaccatggtgatccctatgctgaaccccctggtttactctctgaggaacaaggaagtgaagtccgccttcaagaaggccgttggaaaagccaagagctccattggatttatcttttga

SEQ ID NO: 705 - DNA, 945 bp, Artificial Sequence
  OR5B17 consensus-c
atggaaaacaacaccgaggtgtccgagttcatcctgctgggcctgactaacgcccctgagctgcaagtgcccctgttcatcatgttcaccctgatctacctgatcaccctgaccggcaacctgggaatgatcattctgatcctgctggatagcagactgcacacccctatgtacttctttctgtctaatctgagcctggtcgacttctgctactcctccaccgtgacacctaaggtgatggccggactgctgatcgaggacaaagtgattagctacaacgcatgcgccgctcagatgttcttcttcgccgtgtttgctacagtggaaaattacctgctgtccagcatggcctacgacagatacgccgccgtgtgcaagccactgcactacacaaccaccatgaccacaagagtgtgtgcctgcctggccatcggatgttatgtgatcggcttcctgaacgcttctatccagatcggcgacaccttccggctgtctttttgtatgagcaatgtgatccaccacttcttctgcgacatccccgccgtgatgaccctgacatgcagcgataagcacatcagcgagctgatcctggtgctgatcagcagcttcaacgtgttcttcgccctgctcgtgatcctgatttcttatctctttatcttcatcacaatccttaaaatgcacagcggcgagggctaccagaaagccctgagcacctgcgccagccatctgatcgctgtctccatcttctacggcacagttatcatcatgtacctgcagccttctagctctcacagcatggataccgacaagatcgccagcgtgttctacaccatggtgatccctatgctgaaccccatcgtgtacagcctgcggaacaaggaagtgaagaacgcctttaagaaggtcgtggaaaaggccaagtacagcctgggcagcgtgttctga

SEQ ID NO: 706 - DNA, 942 bp, Artificial Sequence
  OR5H1 consensus-c
atggaagaagagaacgccacactgctgaccgagttcgtgctgaccggctttctgtatcagcctcagtggaaaatcccactgtttctggctttcctggtgatctacctgataacaatcatgggcaacctgggactgatcgccgtgatttggaaagacccccacctgcatatccctatgtacctgctgctgggcaatctggctttcgtggacgcctggatcagctctacagtgacccctaagatgctgatcaatttcctggccaagagcaagatgatctccctgtctgagtgcaagatccaatttttcagcttcgccatcagcgtgaccaccgaatgttttctgctggcaaccatggcctacgacagatacgtggccatctgtaaacctctgctgtaccccgtgatcatgaccaacggcctgtgcattagactgctgatcctgagctacgtgggcggcctcctgcacgccctgatccacgagggcttcctcttcagactgaccttctgcaacagcaacatcgtgcaccacatctactgcgacatcattcctctgttcaagatcagctgcacagattcttctatcaacttcctgatggtgttcatcttctccggcagcatccaggtgttcagcatcgtgaccatcctggtttcttatacattcgtgctgttcaccatcctgaagaagaaaagcgacaagggagtgcggaaggccttcagcacctgcggcgcccacctgttcagcgtgagcctgtactacggccctcttctgtttatgtacgtcggaccagccagcccccaggctgatgaccaggacatggtcgagcctctgttctacacagtgatcatccccctgctcaaccctatcatctacagcctgagaaacaagcaggttaccgatagctttaccaagatgctgaagcggaacgtgaaggtgtcctactga

SEQ ID NO: 707 - DNA, 930 bp, Artificial Sequence
  OR5H2 consensus-c
atggaacaggacaacgccacactgctgacagagttcgtgctgacaggactgacctaccagccagagtggcagatccccctgttcctggtgttcctggttatctacctcatcaccatcgtgggaaatctgggcctgatcgccctgatctggaacgacccccagctgcatatcccaatgtacctgttcctgggcagcctcgccttcgtggacgcctggatcagcagcacagtgacccctaagatgctggtgaacttcttcgctaagagcaagatgatcagcctgagcgagtgtatgatccagttcttttcttttgctttttccggcaccaccgaatgcttcctgctggccaccatggcctacgacagatacgtggccatctgcaagcctctgctttatcctgtgatcatgaccaatagcctgtgcatccgcctgttggtcctgagcttcctgggaggcttcctgcacgccctgatccacgaggtgttcctgtttagactgacattctgcaacagcaacatcatccaccacttctactgcgacatcatccctctgttcaagatctcatgcaccgatcctagcatcaacttcctgatggtgttcatcttcagcggctctatccaagtgttcacaatcctgaccgtgctggtgtcctacaccctggtcctgttcaccattctgaaaaagaaaagcgtgcagggcatcagaaaggccttttctacctgtggcgctcacctgctctccgtgtctctgtactacggccctctgctgtttatgtatgtgcggcctggcagcgcccaggccgacgatcaggatatgatggattctctgttctacaccgtgatcattcccctgctgaaccccatcatctacagcctgagaaacaagaaagtgatcgacagcctgacaaagatgctgaagcggaacgtgtga

SEQ ID NO: 708 - DNA, 930 bp, Artificial Sequence
  OR5H6 consensus-c
atggaagaagagaacgccacactgctgactgagttcgtcctgacaggcttcctgtatcagcctgattgcaaaatccccctgttcctggctttccttgtgatctacctgatcaccatcatgggcaacctgggcctgatcgtgctgatctggaaggacccccacctgcacatccctatgtacctgttcctgggaagcctggctttcgtggacgccctgctctctagcaccgtcacccctaagatgctgatcaacttcctggcaaagagcaagatgatctctctgagcgagtgtatgatccaatttttcagcttcgtgaccacagtgacaacagagtgcttcatcctggccaccatggcctacgacagatacgtggccatctgcaagcctctgctgtaccccgtgattatgaccaacgagctgtgtatccagctgctggtgctgtccttcctgggcggactgcttcatgccctgatccacgaggccttcctgtttagactgaccttctgcaacagcaatatcatccagcacttctactgcgacattatcccactgctgaagatcagctgcaccgacagcagcatcaacttcctgatggtgttcatcttcgccggcagcatccaggtgttcaccatcggaacaattctgatcagctacaccctgattctgctgaccatcctgaaaaaaaaaagcatcaagggcatccggaaggccgtgtctacatgtggcgcccacctgctctctgtgtccctgtactacggccctctggcttttaagtacctgggcagcgccagccctcaggccgacgatcaggatatgatggaaagcctgttttataccgtgatcgtgcctctgctgaaccccatgatctactccctgagaaacaagcaggttatcgactcttttaccaagatgttcaagcggaatgtgtga

SEQ ID NO: 709 - DNA, 933 bp, Artificial Sequence
  OR5H14 consensus-c
atggaagaagagaacgccaccctgctgaccgagttcgtgctgacaggcttcctgtaccagcctcagtggaaaatccccctgttcctggcttttctggtgatctacctgatcaccatcatgggcaatctgggcctgatcgccgtgatctggaaggacccccacctgcatatccctatgtacctgttcctgggcaacctggccttcgtcgacgccctgctgagctctacagttacacctaagatgctgatcaatttcctggccaagagcaagatgatcagcctgtctgaatgtaaaattcagttcttctccttcgccatcggcgtgaccaccgagtgcttcctgctggcaaccatggcctacgacagatacgtggccatctgcaaacctctgctctatcctgtgatcatgacaaacggcctttgtatcagactgctggtgctgagcttcctcggcggcctgctgcacgccctgatccacgagggctttctgtatagactgacattctgcaacagcaacatcatccaccacttctactgcgacatcatccccctcctcaagatcagctgcaccgatagcagcatcaacttcctgatggtgttcatcttcagcggcagcatccaggtgttcaccatcggaaccgtgctgattagctacacttttgtgctgtacaccatcctgaagaagaaaagcgtgaagggaatccggaaggccttttccacatgcggcgcccacctgctgtctgtgtccctgtactacggccctctggccttcatgtacgtgggatctgcttctcctcaagctgatgatcaggacatgatggagagcctgttttacaccgtcattgtgccactgctgaaccccatcatctacagcctgagaaacaagcaggtgatcgacagcctgaccaagatgttcaagcggaacgacgtgtga

SEQ ID NO: 710 - DNA, 930 bp, Artificial Sequence
  OR5K3 consensus-c
atgaccgaggacaaccattctctgacagccgagttcatcctgaccggattcaccgatcacccaaagctgaagaccctgctgttcgtggtgttcttcgccatctatctgatcaccatggtcggcaatctgggcctggtggccctgatctacatggaacggagactgcacacccctatgtacatcttccttggaaatctggccctgatggacagctgctgcagctgtgctattacacctaagatgctggagaacttcttcagcgaagatagaagaatcagcctgtacgagtgcatggcccagttctacttcctctgtctggctgagacaaccgactgcttcctgctggccgctatggcctacgaccggtacgtggccatctgcaaccctctgcagtaccacaccatgatgtctaagaagctgtgcatccaaatgacaacaggcgcctacatcgccggcaacctgcacccaatgatcgaggtgggcctgctgtttagactgaccttctgcggctcccaccagatcaatcacttcttctgcgacgtgctgcctctgtaccggctgagctgtgtggacccctacatcaacgagctgatgctgtttatcctggctggctccatccagatcttcaccatcacaatcgtgctgattagctacttttatatcctgttcaccatttttactatgaaaagcaaggaaggaagaggcaaggccctgagcacctgtgccagccacttcctgagcgtgtccatcttctacggctctctgctgtttatgtacgccagacctggcagcgtgaacgaaggcgataaggacatccccgtggcaatcttttacacactggtcatccctctgctgaaccccttcatctacagcctgcggaacaaggaagtgatcaacgtgatgaaacgcatcatgaaaaagagaaagtga

SEQ ID NO: 711 - DNA, 930 bp, Artificial Sequence
  OR5AK2 consensus-c
atgaccctgggcaacagcacagaggtgaccgagttctacctgcttggctttggagcccagcacgagttctggtgcatcctgttcatcgtgttcctgctgatctacgtgacctccatggtcggcaatacaggcatgatcctgctcatcaacaccgacagcagactgcagacccctatgtactttttcctgcaacatctggccttcgtggacatctgctacaccagcgctatcacccctaagatgctgcagaacttcacagaggaaaacaagagcatcagctttcagggctgtgtgatccagctgctggtctacgccacattcgccacatctgattgctacctgctcgccgccatggctgtggatagatacgtggctatttgtaaacctctgcactaccccatcatcatgagccggaccgtgtgcatccagctggtggccggcagctacatcatgggctccatcaacgccagcgtgcacaccggcttcaccttttctctgagcttttgcaagagcaatagcatcaaccacttcttctgcgacgtgccacctatcctggctctgtcttgtagcaacatcgacatcaatatcatgctgctggtggtgttcgttggattcaacctgatcttcaccgtgctggtcgtgatcttcagctacatctacatcatggccaccattctgaaaatgtctagcagcgccggaagaaagaagtccttcagcacctgcgccagccacctgaccgccgtgacaatcttctatggcacactgtcttatatgtacctgcagccccacagcaacaactcccaggagaacatgaaggtggcctctgtgttctacggcatcgtgattcctatgctgaatcccctgatctacagcctgcggaacaaggaagtgaaggaggccctgaaggtgatcggcaagaaattcttttga

SEQ ID NO: 712 - DNA, 936 bp, Artificial Sequence
  OR5AR1 consensus-c
atggacaaggagaacagcacaatggtgacagagttcatcctgatgggcatcacccaggaccctcaaatggaaatcctttttttcgtggttttcctcatcatctacctggtgaacgtggtgggcaacatcggaatgatcatcctgatcacactggatagccagctgcacaaccctatgtacttcttcctgtggcatctgtctttctgcgacatctgctacagctctgccatcgcccctagaatgctgagcgacctgctgtccgagagcagaaccatctcttttagcagctgcgccgctcagttctatttcttcgccgctttcgtggacgccgagtgctacatcctggccgtgatggcctacgacagattcgtggccatttgcaaccccctgctgtactccacagccatgagtaagagcctgtgcatcgccctgctgttgggctcttacatcgccggcacaacaagcgccattatccacaccaccgctaccttctcactgagcttttgcagcagcaacctgattaaccactttttctgtgatgtgccacctctgctcgccatctcttgttctgacacccacatcaatgagatcctgctgttcagcttctgtggcttcgtggagttcagctccctgagcatcatcctgatcagctatatcttcatcctggctgccgtgctgcggatgcggagcggcagactgaaagccttctccacctgcggcagccacttcaccggagtgaccctgttttacggcaccgtcatctttatgtacctgaggcctaccagcgtgtacgccctggatcaggataagtgggcttctgtgttctacaccgtggtcatacccatgctgaatcccctgatctacagcctgagaaacaaggacgtgaaggaagcctttcggaagctgatcggcaagaaactgaacagcgtgctgtga

SEQ ID NO: 713 - DNA, 939 bp, Artificial Sequence
  OR5AS1 consensus-c
atgctggaaagcaactacaccatgcctacagagttcctgctggtgggcttcaccgattatctgcctctgcgggttacactgttcctcgtctttctgatcgtgtacaccctgacaatggtgggcaacattggcctgatcatcctggtcaacatcaactctagcctgcagacccctatgtactacttcctgtctaatctgagcttcctggatatctcttacagcacagccatcacccctaaaatgctggtgaatttcctggccagcagaaagagcatcagcccatacggctgcgccctgcagatgttcttcttcgcctgcttcgccgacgccgagtgcctgatcctggctgctatggcctacgacagatacgccgctatctgcaaccctctgctgtactccacactgatgagcaggcgggtgtgcgtgtgttttatcgtgctggcctactttagcggcagcaccaccagcctggtgcacgtgtgtctgaccttcagactgccattctgtggatctaacatcgtgaaccacttcttttgcgacatcccccccctgcttgccctcagctgcacagacacccatatcaacgagctgctcctgtttgccctgtgcggatttatccagacctccacattcgtggtgatcttcatcagctatttctgcatcctgatcaccgtgctgtccatcaagtcctctggcggcagaagcaaaaccttcagcacctgtgctagccacctgatcgccgtgaccctgttctacggcaccctgctgttcatgtatctgagacctacaaccagctacagcctggacacagataaggtggtcgccgtgttctacaccgtggtgttccctatgttcaaccccatcatctactcttttcggaacaaggacgtgaagaacgccctgaagaagctgctggaaagaattggctacagcaattga

SEQ ID NO: 714 - DNA, 936 bp, Artificial Sequence
  OR6B1 consensus-c
atggaagtggaaaatcagacaagagtgaccaagttcatcctggtcggcttccccggcagcctgagcatgcgggccgctatgttcctgatcttcctggtggcctatattctgaccgtcgcagagaacgtgatcatcatcctgctggtgcagcaaaaccggcctctgcataagcccatgtattttttcctggctaatctgagcttcctggaaacctggtacatcagcgtgaccgtgcctaagctgctgttcagcttctggtccgtgtccaacagcatcagcttcacccactgcatgatccagctgtacttcttcatcgccctgatgtgcaccgagtgcgtgctgctggccgccatggcctacgacagatacgtggccatctgcagacctctgcactaccccacaatcatgtctcacggcctgtgttttagactggctcttggaagctgggccatcggattcggcatcagcctggccaagatctacttcatctctagactgagcttttgcggccctaacgtgatcaaccacttcttctgcgacatctctcctgtgctgaacctgtcttgtaccgatatgagcatcgccgagctggtcgacttcgtgctcgctctggttatcttcctgtttccactgtctatcaccgtgctgagctacggctgcatcctggctacaatcctgaggatgcctacaggcaagcagaaagccttcagcacctgtgcctcccacctggtggtggtgacaattttttacagcgccacaatcttcatgtacgccagacccagagccatccacgcctttaacatgaacaagatcatcagcatcttctacgccatcgtgacccctgcccttaatccattcatctactgcctgcggaacagagaggtgaaggaggccctgaaaaagctggcctactgtcaggcctctcggagcgattga

SEQ ID NO: 715 - DNA, 933 bp, Artificial Sequence
  OR6B3 consensus-c
atgagaggcgagaacgtgacaaaggtgtctacattcatcctgctgggcttccccaccgcccctggcttgcaatacctgctgttcctgctgttcctgctgacatacctgtttgtgctggtcgagaacctggctatcatcctgaccgtgtggagctctacatctctccacagacctatgtactatttcctgggcagcatgagcttcctggaaatctggtacgtgtctgatatcatccctaagatgctggaaggcttcctgctgcagagaaagcggatctccttcgtgggctgcatgacccagctgtacttctttagcagcctggtttgtaccgagtgcgtgctgctggctagcatggcctatgatagatacgtggccatctgccaccccctgcgctaccacgtgatcatgaccaccggcctttgtgtgcagctggtcggcttcagcttcgtgtccggcttcaccatctccgtgatcaaggtgtacttcatcagcagcgccaccttctgcggaagcaacgtgcttaatcacttcttctgcgacatcagccctatcctgaagctggcctgcaccgacttcagcacagccgagctggtggacttcattctggcttttattatcctggtctttccactcctggccaccgtgctgagctacggccacatcaccctggccgtgctgagaatccccagcgccacaggaagatggcgggcctttagcacatgtgccagccatctgaccgtggtgaccatcttctacacagctctgctgttcatgtacgtgcggccccaggccatcgactcaagatcttccaacaaactgatcagcgtgctctacaccgtgctgacccctatcctgaatcctctgatctactgcctgcggaacaaggagttcaagaacgccctgaaaaaggccctgggactgactagctgctga

SEQ ID NO: 716 - DNA, 939 bp, Artificial Sequence
  OR6C2 consensus-c
atgaagaaccacaccgtgatcactacattcattctgctgggcctgaccgacgaccctcagctgcaggtgctgctgtttatcttcctgtttctgacatatatgctgtctgtgaccggcaacctgaccatcatcacactgaccctggtagatcaccatctgaagacccctatgtacttcttcctgagaaatttcagcttcctggaagtgagctttaccacagtgtgcatccccagattcctgtacagcattagcatgggcgacaataccatcacatacaacgcatgcgccagccagattttctttgtgatcctgttcggcgccaccgagttcttcctgctggctgctatgagctacgacagatacgtggccatatgcaagcctctgcactacatggttatcatgaacaaccgggtgtgcacactgctggtcctgtgctgttgggtggccggacttatgatcatcgtgcctcctctgagcctgggcctgcagctggagttctgcgacagcaacgccatcgatcacttcagctgtgatgccggacctctcctgaagatcagctgcagcgacacctgggtcatcgagcagatggtgatcctgatggccgtgttcgccctgatcatcaccctggtgtgtgtgatcctgtcttatctgtacatcatccggaccatcctcagatttccaagcgtgcagcagcgcaagaaagccttctccacctgtagctcccacatgatcgtggtgtccatcgcctacggcagctgcatcttcatctacatcaagccctctgccaaggacgaggtcgccatcaacaaaggcgtgagtgtgctgacaaccagcgtggcccctctgctgaaccccttcatctacaccctgcggaacaagcaggtgaagcaagctttctctgatagcatcaaaagaatcgccttcctgtctaagaagtga

SEQ ID NO: 717 - DNA, 936 bp, Artificial Sequence
  OR6C3 consensus-c
atgaaccacaccgtgatcaccgagttcgtgctgctgggcctgtctgatgatcctgatctgcagatcgtgatctttctgttcctgttcatcacatacatcctgagcgtgacaggcaatctgacaatcatcaccctgaccctggtggacagccatctgcagacccctatgtatttctttctgaggaacttcagcttcctggagatctccttcaccacagtgtgcatcccaagattcctgggagccatcattacaagagataagaccatctcttacaacaactgcgccgctcagctgttcttcttcatcttcatgggcgtgaccgagttctacatcctgacagccatgagctacgaccggtacgtggctatctgcaagcctctgcactacaccaccatcatgaatagaaaactgtgtacccttctggtcctgtgtgcctggctgggcggattcctgacaatcttcccccccctgatgctgctgctccaactggactactgcgctagcaacgtgatcgaccactttgcctgcgactacttcccactgctgcagctgagctgcagcgacacctggctgctggaagtgatcggcttttacttcgccctggtgaccctgctgttcaccctggccctggtgattctgtcctacatgtacattatccggacaatcctgagaatccctagcgcttctcagagaaagaaagccttctcaacatgctctagccacatgatcgtgatctctatcagctatggcagctgtatcttcatgtacgccaaccccagcgccaaagagaaggccagcctgaccaagggcgtggccatcctgaacacctccgtggcccctatgctgaatcctttcatctacaccctgcggaaccagcaggttaagcaggcctttaaggacgtggtgcacaaggtggtctttagcagcaacaagtga

SEQ ID NO: 718 - DNA, 930 bp, Artificial Sequence
  OR6C4 consensus-c
atgaagaaccggaccatgttcacggagttcatcctgctgggactgaccaaccaacctgagctgcaggtggtcatctttatcttcctgtttctgacctacatgctgtccgtgctgggcaatctgaccatcatcatcctgaccctgctggatcctcatctgcagacccctatgtactttttcctgaggaatttcagcttcctggaaatcagctttaccagcatctttatccccagattcctcacaagcatgaccaccggcaacaaagtgatcagctttgccggctgtctgacccagtacttcttcgccatcttcctgggcgccacagagttctacctgctggcctccatgagctatgatagatacgtggccatctgcaagcctctgcactacctgacaatcatgagcagcagagtgtgcatccagctggtgttctgttcttggctgggcggattcctcgctatcctcccccccatcatcctgatgtctcaggtcgacttctgcgcctccaacgtgctgaaccactactactgcgactacggccctctgctggagctggcttgtagcgacaccagcctgctggaactgatggtgatcctgctggccgtggtgaccctggtggtgaccctggtgctggttaccctttcttatacatacattatccggacaatcctgagaatcccatctgcccagcaaagaaccaaggccttctcaacatgcagcagccacatgatcgtgatcagcctgtcttacggcagctgcatgttcatgtacatcaaccctagcgccaaggaaggcggcgctttcaacaagggcatcgccgtgctgatcaccagcgtgacacctctgctcaaccccttcatttacaccctgcggaaccagcaggtgaagcaggccttcaaggacacagtgaaaaagatcgtgaagctgtga

SEQ ID NO: 719 - DNA, 945 bp, Artificial Sequence
  OR6C6 consensus-c
atgaaaaaccagagcatggaaatcgagtttatcctgctcggactgaccgatgatcctcagctgcagatcgtgatcttcctgttcttgtttctgaactacacactgagcctgatgggcaacctgatcatcatcctgctgacactgctggaccccagactgaaaacccctatgtacttcttcctgcggaatttctctttcctggaaatcatcttcaccaccgtgtgcatcccccggttcctgatcacgatcgtgacaggcgacaagacaatcagctacaacaactgcgccgcccagctgtttttcttcctgctactgggcgtgacagagttctacctgctcgccgctatgagctacgacagatacgtggctatctgcaagcctctgcactaccccatcatcatgaactctaaagtgtgttaccagctggtcctctccagctgggtgaccggattcctgattatctttccacctctggtgctgggcctgaagctggatttctgcgcctccaagaccatcgaccacttcatgtgcgacaccagcccaattctgcagatcagctgtaccgacacccacgtgcttgagctgatgagcttcaccctggctgtggtgaccctggtcgtgacactggtgctggtcatcctgagctatacctgtatcatcaagaccatcctgaagttcccttctgcccagcaacggaccaaggccttcagcacctgcagctcccatatgatcgtggtgtccatgacctacggcagctgcatctttatgtatatcaagcccagcgccaaggaaagagttacactgtctaagggcgtggccgtgctgtacacaagcgtggcccctctgctgaaccctttcatttacaccctgagaaatcagcaagtgaaggaggccttttgggacgtgctgcagaagaacctgtgcttctctaaaagacctttctga

SEQ ID NO: 720 - DNA, 939 bp, Artificial Sequence
  OR6C65 consensus-c
atgcctaacaagaccagcatccgggagttcatcctgcttggactgacagacgaccccgagctgcaggtggtcatctttttcttcctgctgatcacctacctgctgagcgtgtccggaaacatgaccatcatcacactgaccctgtctaatatccacctgaagacacctatgtacttcttcctccgcaacttcagcttcctggagatcagttttaccaccgtgtgtatccccagattcctgatcagcattgctacaggcgacaccaccatcagctacaacgcctgtatggcccaagtgttcttcctgatcctgctgggcagcacagagttctttctgctggccgtgatgtcctatgatagatacgtggctatctgcaagcctctgcattacaccacaatcatgaacaacaaggtgtgcaaccagctggtcatcagcagctggctggccggcttcctgatcatctttccacctgtgatcatgggcctgcagctggacttctgcgacagcaatatcatcgaccacttcacctgtgattctagccctatgctgctgatcgcctgcaccgatactcagttcctggagctgatggctttcttcttggccgtgttcaccctgatggtgaccctggccctggtgatcctgtcctacacactgatcctgagaaccatcctgaagattccttctgcccagcagcggaagaaggccttttctacatgcagcagccacatgatcgtggtgtctatctcttacggcagctgcattttcatgtacgtgaagacaagcgccaaggaaggcgtggccctgagcaagggcgttgctgtgctgaataccagcgtggcccctatgctgaaccccttcatctacaccctgagaaaccagcaagtgaaacaggccctgaaggacttcaccaagaaaatcctgagcagcaacaaacagtga

SEQ ID NO: 721 - DNA, 939 bp, Artificial Sequence
  OR6C68 consensus-c
atgcggaatcacaccgctatcacaaccttcatcctgctgggcctgacagaggacccccagctgcaagtgctgctgtttatctttctgttcattacctacatgctcagcgtgaccggcaacctgaccatcatcaccctgaccctggtggaccctcacctgaaaacccctatgtacttcttcctgcagaacttctccttcctggaaatctcctttacaaccgcctgcgtgcccagattcctgtacagcatcagcacaggagatcggaccatcacatacaacgcctgtgtgatccagctgttctttaccgacctgttcggcgtgacagagttcttcctgctggccaccatgagctacgacaggtacgtggccatctgcaaacctctgcactacatgacaatcatgagcaataaggtgtgcaagaccatggtcatttgctgctggatggccgctctgatgatcatcctgcctcctctctctctgggcttccatctggagttctgcgatagcaacgtgatcgaccacttcggatgtgatgcctctccaatcctgaagatcagctgtagcgacacctggctgatcgagcagatggtgatcgcctgcgccgtgctgacattcatcatcacactggtctgcgtggtcctgtcttatatttacatcattagaaccatcctgaagttccccagcgtgcagcagagaaagaaggcctttagcacctgttctagccacatgatcgtggtgtccatcacctacggcagctgcatcttcatctacatcaagcctagcgccaaggaagaggtgaacatcaacaagggcgtgtctgtgctgatctccagcatcagccctatgctgaaccccttcatctatacccttagaaacaagcaggttaagcaggcctttcacgacagcctgaaaaagatcgctttcctgctgaagaaatga

SEQ ID NO: 722 - DNA, 939 bp, Artificial Sequence
  OR6C70 consensus-c
atgaaaaaccacaccagacagatcgagttcatcctgctgggcctgaccgacaacagccagctgcaaatcgtgatctttctttttctgctgctgaactacgtgctcagcatgataggaaatctgaccatcatcgccctgacactgttggatagccacctgaagacacctatgtacttcttcctgcggaacttcagctttctggaaatctccttcaccacagcctgcattcctagattcctgatcaccatcgtcacaagagagaagaccatctcttacaacggctgtatttcccagctgttcttctacatcttcctgggagtgacagagttctttctgctggcagctatgagctatgatagatacgtggctatctgtaaacccctgcactacaccagcatcatgtctagcagagtgtgccaccagctcgtgctgtccagctgggtcacaggcttcctggtcatcttccctccactgatccttggcctgaatctggacttctgcgccagcaacatcatcgaccacttcatctgcgacatcagccctgtgctgcagctgtcttgtagcgacacccacctgctggaactgatcgccttcctgctggccgtgatgaccctgatcgttaccctgctgctggtgatcctgagctacagctacatcatcaagaccattctgaagttccccagcgcccagcaaaagaagaaagcctttagcacatgctcttctcatatgatcgtggtgtccatcacatacggcagctgcatctttatctacatcaagccttctgccaacgagcgggtgaccctgagcaagggcgtggccgtgctgaataccagcgtggcccctctgctgaaccccttcatctataccctgagaaaccagcaggtgaagcaggccttccgggccgtgttccgcaagatcttcagcgcttctgataagtga

SEQ ID NO: 723 - DNA, 939 bp, Artificial Sequence
  OR6C74 consensus-c
atgcggaaccacaccaccgttacaacttttatcctgctgggcctgaccgatgatcctcagctgcaggttgtgatcttcctgctgctgttcttcacatacatgctgagcgtgacaggcaacctgacaattattacactgaccctgctagacagccacctgaagacccctatgtacttcttcctgcggaacttctctttcctggaaatcagcttcaccacagtgtgtatccccaaattcctggtctccatggccacaggagataagaccatcagctacaacgactgcgccgctcagctgttctttacaattctgctgggagccaccgagttcttcctgctggccgccatgagctatgatagatacgtggccatctgcaagcccctgcactacaccaccatcatgagcagtagagtgtgcaacctgctggtgttcgccagctggctggccggcttcctgatcatctttccacctctgctcatgggcctgcaactcgacttctgtgctgctaataccgtggaccacttcttttgcgacgtgtctccaatcctgcagctgagctgcaccgacaccgacatcatcgagctgatgatgctgctgtctgctatcctgaccctgctcgtgaccctggtgctggtgatcctgagctacaccaatatcatcagaaccatcctgaaaatccctagcagccagcagagaaagaaagccttcagcacatgcagcagccatatggtcgtggtgtccatctcttacggctcttgtatcttcatgtacgtgaaacctagcgccaaggaacgggtgtccctgaacaagggcatcgccctgctgtctacaagcgtggcccctatgctgaaccccttcatctacaccctgagaaacaagcaggtgaaggacgccttcaagcacatggtgaagaagatcgagctgtttagcatgaagtga

SEQ ID NO: 724 - DNA, 939 bp, Artificial Sequence
  OR6C75 consensus-c
atgcggaacagcaccgccgtgaccgagttcatcctgctgggactgaccagcgacccccagtggcaggtggtcctgttcatcttcctgcttgttacctacatgctgagcgtgaccggcaatctgatcatcatcaccctgaccctgtctgacccccacctgcaaacacctatgtacttcttcctgagaaacttctcattcctggaaattagctttacaagcgtttgtatccctagattcctggtgacaatcgtgaccggcgatagaacaatctcctacaacggctgcgtggcccagctgtttttcttcatcttcctgggcgtgacagagttctacctgctggccgctatgagctacgaccggtacgtggctatttgcaagcccctgcactacaccacaatcatgagctctagagtgtgcatcctgctggtgttcagcagctggctggctggattcctgatcatcttccctccaatcatcctgttgctgcaactggacttctgcgcctctaacatcattgatcacttcatctgcgacagctcccctatcctgcagctgtcttgtaccaacacacactttctggagctgatggccttctttctggccgtggtgaccctgatggtgacactgacactggtgatcctgagctatacctatatcatcaggaccatcctccggatccccagcatgtctcagagaaagaaagcctttagcacctgtagcagccatatgatcgtggtgtccctgtcttacggcagctgcatctttatgtacatcaagcctagcgccagagaaagagtgaccctgtccaagggcgtggccgtgctgaacaccagcgtggcccctctgctgaatcctttcatctacaccctgagaaaccagcaggtgaaacaggccttcaagaacatggtccagcggatgatcttctctagcaacaagtga

SEQ ID NO: 725 - DNA, 936 bp, Artificial Sequence
  OR6C76 consensus-c
atgaagaacagaacctctgtgaccgacttcatcctgctcggactgacagacgatcctgagctgcaggtggtgatcttctctttcctgttcctgacatatgtgctgagcgtgaccggcaacctgaccatcattacactgaccctgctggacagccacctgaagacacctatgtatttcttcctgaggaactttagctttctggaaatcagctttacaagcgtttgtaatcccagattcctggtcagcatcctgaccggcgacaagagcatctcctacaacgcctgtgccgcccagctgttcttcttcattctgctgggcagcaccgagttctttctgctcgctagtatgtcttacgacagatacgtggccatctgcaagcctctgcactacaccaccatcatgagcgataaaatctgctaccaactggtgattagcagctggctggctggcttcctggtgatcttcccccccctggccatgggactgcagctggatttctgcgacagcaacatcatcgaccacttcacctgcgattctgctccactgttgcaaatctcctgcaccgacaccagcactctggagctgatgagcttcatcctggccgtgttcaccctgatgtctaccctgatcctggtcatcctgtcctacacctacatcctgagaacaatcctgcggatcccttctgcccagcagagaaaaaaggcctttagcacatgcagctcccacatgatcgtggtgtctatcagctacggctcctgtatctttatgtacgtgaagaccagcgccaaggaaggcgtggccctgacaaagggcgtggccatcctgaataccagcgtggctcctatgctgaaccctttcatctacacactgcggaaccagcaggtgaaacaggccttcaaggacgtggtgcggaagatcagccataagaagaaatga

SEQ ID NO: 726 - DNA, 948 bp, Artificial Sequence
  OR6K3 consensus-c
atggaatctggcaatcagagcacagtgaccgagttcatctttaccggcttcccccagctccaggacggcagcctgctgtacttcatcccactgctgttcatctacacattcatcgtgatcggcaacctgctgatcttctttgccgtgcggctggatacaagactgcacaacccaatgtacaacttcatctctatcttcagcttcctggaaatctggtacaccaccgccacaatccccaagatgctgtctaatctgatctccgagaagaaaaccatcagcatgaccggatgtctgctgcagatgtatttctttcacagcctgggcaacagcgagggaatccttctgaccaccatggccatcgatagatacgtggctatctgcaaccctctgcggtaccccaccatcatgacacctagactgtgcgcccagctgagcgccggctcatgcatcttcggctttctgatcctgttgcctgagatcgtgtggatctccaccctgcctttttgcggccctaaccagattcaccagatcttctgcgacttcgagcctgtcctgagcctggcctgcaccgacaccagcatgattctggtcgaagatgtgatccatgccgttgctatcatcatcagcgtgctgatcatcgccctgagctacatcagaatcattacagtgatcctgaggatccccagctctgagggcagacagaaggccttcagcacctgtgccgcccacctgatggtgttcctgattttcttcggctccgtgtctctgatgtacctgagattctccgctacatttcctcctgtgctggacaccgctatcgccctgatgttcgccgtgctggcccctttcttcaaccccatcatctacagcctgcggaacaaggacatgaaaaacgccatcaagaagctgctgtgtctgcaaaaggtgctgaataagagcggcggatga

SEQ ID NO: 727 - DNA, 960 bp, Artificial Sequence
  OR6K6 consensus-c
atgacacagctgatggccagcggcaatcagaccatggtgaccgagttcctgtttagcatgttcccccacctgcacgagggcggactgctgttctttattcctctgcttctgatctacggcttcatcataacaggcaacctgatcatcttcatcgtgatccagctggatatggcactgcatacccctatgtacttcttcatcagcgtgctgagcttcctggaaatctggtacaccaccaccaccatccccaagatgctgtcttgtctggtgagcgaacagaagaccatcagcctggccggctgtctgctccagatgtatttctttcacagcctgggcatcacagagggatgcgtgctgacagccatggccatcgacagatacatcgccatctgcaacccactgcggtatcctacaatcatgacccctaagctgtgtatccaactgaccgccggcagctgcctgtgcggcttcctgctggtgctgcctgagatcgcttggatcgctacactgcctttctgcggcagcaaccagatccaccagatcttttgcgacttcacccccgtgctgtccctggcctgcaccgacacatctctcgttgtgatcgtggacgctattcacgccgtcgagatcctggcttctttcctggtgattgccctgagctacatccggatcatcatcgtgatcctgggcatgcctagcgctgaaggcagacacaaggccttcagcacctgcgccgctcacctggccgtgttcctgctgttctttggctctgtcgccgtgatgtacctgagattcagcgccacatactccgtgttctgggataccgccatcgccgtgaccttcgtgatcctggccccatttctgaaccccatcatctactcccttagaaacaaggacatgaaagatgccatcggacggctgttccactaccagaaaagagccggctgggccggaaagtga

SEQ ID NO: 728 - DNA, 954 bp, Artificial Sequence
  OR6N2 consensus-c
atggaacagcacaaccacagcagcctggccgagttcgtgctgctgggatttccaagcgtgggccacgtgcgcggctggctgttcgtgctgctgctgctggcctacctgtttaccatttgtggaaatatgctgatctttctcgtgatcagactggatgccgctctgcacactcctatgtatcacttcgtgtccgtcctgagcttcctggaactgtggtacaccgccaccaccatccctaagatgctggccaatctgctgtctgagaagaagaccatctccttcgccggctgtctgctgcaaacatacttcttccacagcctgggcgctagcgagtgctacctgttgacagccatggcttacgacagatacctggccatttgcagacctctgcactaccccgccatcatgaccacaacactgtgcgccaagatggccgctggctgctggacctgtggcttcctctgtcctatcagcgaggtgatcctggtgtctcagctgcctttctgcggctacaacgagatccagcatatcttctgcgacttccctcccctgctgtctctggcatgcaaggacaccagcaccaacgtgcttgtcgacttcgccatcaacgccttcatcatcctgatcaccttcctgttcatcatggtgtcctacggcagaatcatcggagccgtgctgaagatcaagacagccgccggcagaaagaaagctttcagtacctgcgccagccacctggccgtggtgcttatctttttcggcagcatcatcttcatgtacgtgcggctgaagaaatcttatagcctgaccctggaccggaccctggctgttgtgtacagcgtgctgacacctctggtgaaccccatcatctacagcctgcggaacaaggaactgatcaaggccattaaaagaacaatctttcagaaaggcgataaggccagccccacccaccactga

SEQ ID NO: 729 - DNA, 936 bp, Artificial Sequence
  OR8S1 consensus-c
atggctctgaggaatcacagcaccatcaccgagttcatcctgctcggcctgagcgccgatcctaacatccaggccctgctgttcgtgctgttcctgggcatctatcttctgacaatcatgggcaacctgatgatgctgctggtgattagagccgacagccacctgcacacccctatgtacttcttcctgagccatctgtcttttctggacctgtgcttttcctcggtgaccgtgcctaaaatgcttgagaacctgctgagccaaagaaagaccatcagcgtggaaggctgtctggcccaggtgttctttgtgttcgtcaccgccggcacagaggcctgcctgctgtccgtgatggcctacgaccggtacgccgccatctgccaccctctgctgtacggccagatcatgggcaagcagctgtgcatgcacctggtctggggcagctggggactgggattcctggacgccctgatcaacatcctgttggctgtgaacctggacttctgcgaagccaagatcatccaccactacagctgcgagctgccttccctgctcccactgtcttgtagcgatgtgtctagaaacctgatcgccctgctctgtagcacactgctgcacggcctgggcaccttcctgctgatcttcttctcctacaccagaatcatcagcacaattctgagcatcagctctaccagcggaagaagcaaggccttctctacatgcagctcccacctgaccgccgtgacattcttctacggcagcggcctgctgcggtatctgatgcccaatagcggaagtcctatcgagctgatctttagcgttcagtacagcgtggtgacccccatgctgaaccccctgatctactctctgaaaaacaaggaagtgaaggcagctctgagaagaaccctggagaagtacctgcagcacatccggtga

SEQ ID NO: 730 - DNA, 945 bp, Artificial Sequence
  OR9A2 consensus-c
atgatggacaatcacagctctgctacagagttccacctgctgggatttccaggcagccaaggcctgcaccacatcctctttgccatctttttctttttttacctggtgacactgatgggcaacaccgtgatcatcgttatcgtgtgcgtggataagagactgcagagccccatgtacttcttcctgggccacctgagcgccctggaaatcctggtgaccaccatcattgtgcctatgatgctgtggggactgctgttgcctggaatgcagaccgtgtctctgagcctgtgcatcgcccagctgttcctgtacctggccgtgggcacaacagagttcgccctgctgggcgtgatggctgtggacagatacgtggccgtgtgcaatcctctgcggtacaacatcatcatgaacagcagcacctgtatctgggtcgtgatcgtctcctgggtgttcggcttcctgagcgagatctggcctgtgtacgccaccttccagttcacattctgcaagagcaacagcctggaccacttctactgcgaccggggccagctgctgaagctgtcttgtgataacactctgttcaccgagttcatcctgttcctgatggccgttttcatcctgattggaagcctgatccctacaatcgtgtcctacacctatatcatcagcaccatcctgaaaatccccagcgcttctggcagaaggaaggccttcagcacatgtgccagccatttcacctgtgtggtgattggctacggctcttgcctgtttctgtatgtgaaacctaagcagacccagggcgtggaatacaacaagatcgtctccctgcttgtgtccgtgctgacccctttcctgaaccccttcatcttcaccctgagaaacgacaaggtgaaagaagccctgagagatggcgtgaagcggtgctgccagctgctcaaggactga

SEQ ID NO: 731 - DNA, 945 bp, Artificial Sequence
  OR9A4 consensus-c
atgctgatgaactacagcagcgccacagagttctacctgctgggattccccggcagcgaggaactgcaccacatcctgtttgccatctttttcttcttctacagcgtgaccctgatgggaaataccgtgatcatcgtgattgtgtgcgtggacaagcggctgcagagccctatgtacttcttcctgggccacctgtctgctctggaaatcctggtgaccacaatcatcgtgccagtgatgctgtggggcctgttgctgcctggcatgcagaccatcagcctggctgcctgcgtggtgcaactgttcctgtacctggccctcggaacaacagagttcgccctgctgggcgccatggctgtggatagatacgtggccgtgtgtaatcctctgagatataacatcatcatgaacagccacacctgtatctgggtcgtgatcgtttcctgggtgttcggcttcctgttcgagatctggcctgtgtacgccacctttcagctgaccttctgcaagagcaacgtgctggaccatttcttctgcgacagaggccagctgctgaaactgagctgtaacgatacactgtttaccgagttcatcctgttcctgatggccgtgttcatcctgtttggctctctgatccccaccatcgtgtcctacacctacatcattagcaccatcctgaagatccctagcgccagcggcagaagaaaggccttttctacctgcgcctctcactttaccttcgtggtgatcggctacggcagctgcctgttcctttatgtcaagcctaagcagacacaggccgctgagtacaacagggtggtgtccctgatggtgtctgtggtcacacctttcctgaaccccttcatcttcaccctgcggaacgacaaagtgatcgaggccctgcgggacggcgttaagagatgctgccagctgttcaagaactga

SEQ ID NO: 732 - DNA, 945 bp, Artificial Sequence
  OR10A3 consensus-c
atgaagcggcagaaccagagcagcgtggttgagttcatcctgctgggcttcagcaacttccctgagctgcaggagcagctgttcggcgtgttcctggtgatctacctggtgaccctgatgggcaacgccattatcatcgtggtgatctctctgaaccagtctctgcacgtgcctatgtacctgtttctgcaaaatctgagcgtggtggaagtgtccttcagcgccgtgatcatgcctgagatgctggtggtgctgagcaccgagaagaccaccatcagcttcgttggatgttttgctcagatgtacttcatcctgctgtttggcggaacagagtgcttcctgctgggcgccatggcctacgataggttcgccgctatctgccaccccctgtcttatcctgtgatcatgaacaagagagtgttcatgaaactggtcatgttcagctgggtgtccggcatcatggtcgccaccgtgcagaccacatgggtgttcagcttccccttctgcggccctaacgagatcaaccacctgttttgtgaaaccccccccgtcctggaactggcctgcgccgacaccttcctgttcgagatctacgccttcaccggcacaatcctgattgtgatggtgcctttcctgctgatcctgctttcttacatcagaatcctctttgccatcctgaagatgcccagcacaaccggcagacagaaggccttttctacctgcgctagccacctgaccagcgtgacactgttctacggcaccgccagcatgacatacctgcaacctaagtccggttatagccctgaaactaagaagctgatgagccttgcttactctctgctgaccccactgctgaatccactgatctacagcctgagaaacagcgagatgaaacgggccctgatgaaactgtggcggagaaaggtgatcctccatacattctga

SEQ ID NO: 733 - DNA, 951 bp, Artificial Sequence
  OR10A7 consensus-c
atgatctgtgaaaaccacaccagagtgaccgagttcatcctgctgggcttcacaaacaatcctgagatgcaggtgtctctttttatcctgtttctggctatctacaccgtgacactgctcggcaacttcctgatcgtgacagtgaccagcgttgatcctgccctgcagacccctatgtatttcttcctgagaaatctgagcctgctggaagtgtgcttcaccctggtgatggtgcctaagatgctggtggacctggtctcccctagaaagatcatcagcttcgtgggatgtggaacacagatgtacttcttcttctttttcggctccagcgagtgcttcctgctgagcatgatggcctacgacagattcgtggccatttgcaatccactgcggtacagcgtgatcatgaaccggagcttgtgcctgtggatggccatcggctcctggatgagcggcgtgccagtgtctatgctgcaaaccgcctggatgatggctctgcctttttgcggccccaacgccgtggaccacttcttctgcgacggtcctcctgtgctgaagctggtcaccgtggatacaaccatgtacgagatgcaggccctggcttctacactgctgtttatcatgttccccttctctctgatcctggtttcttacaccagaatcatcattaccatcctgagaatgcccagcgccaccggcagacagaaggccttcagcacctgtagcagccacctgatcgtggtgtccctgttctacggcacagccagcctgacctacctgcgccccaagagcaaccagagccctgaaagcaagaagctggtcagcctttcttatacagtgatcacacctatgctgaaccccatcatctacagcctgcggaacaacgaggtgaagggcgccgtgaaaagaaccatcacccggaaggtgctgcagaaactggacgtgttctga

SEQ ID NO: 734 - DNA, 936 bp, Artificial Sequence
  OR10G6 consensus-c
atgcagagcggaaatcagacctccgtgtctcacttcatcctggtgggcctgcatcaccctcctcagctgggtgttcctctgttcctggcttttctggtcatctacctgctgaccgtgtccggcaacggcctgatcatcctgacagtgttggtggacatccggctgcaccggcctatgtactggttcctgtgccacctgagcttccttgatatgaccatctctagcgccattgtgcccaagatgctggccggctttctcctggattccagagtgatcagcttcggcggctgcgtgattcagctgtttagctttcacttcctgggatgtaccgagtgcttcctgtacaccctgatggcctacgacagattcctggccatctgcaagcctctgcactacgccaccatcatgaccagaaaggtgtgcaacagcctggccctgggcacatggctgggcggaacactgcacagcctgttccagacaagcttcatgttcagactccccttctgcggccctaaccgggtggactacttcttctgcgacatccccgccatgctgagactggcttgtgccgacaccaccatcaacgagctggtgacctttgtggacatcggcttcctggctctgacctgctttgtgctgatcctgacaagctacggctacatcgtggccgctatcctgagaatcagaagcgccgatggcagaaggaatgccttcagcacctgtgccgcccacctgaccgtggtgatcgtgtactatgtgccatgtacattcatctacctgcgcccaggatctcaggagcctctggacggcgtggtcgccgtgttctacaccgttatcacccctctgctgaaccccatcatctatacactgcggaacaaggaaatgaaagccgccctgcaaagactgggcggccacaaggaagtgcagcctcactga

SEQ ID NO: 735 - DNA, 933 bp, Artificial Sequence
  OR10G9 consensus-c
atgagcaataccagcctggtcaccacattcatcctgaccggcctgccccacgcccctgccctggacgcccccctgttcggcatcttcctggtgatctacgtgctgaccgtgctgggcaacctgctgatcctgctcgtgatcagagtggacagccacctgcacacacctatgtactacttcctgacaaacctgtccttcatcgatatgtggttcagcaccgtgacagtgccaaagatgctgatgaccctggtgtctcctggcggaagggccatctctttccacagctgcgtggcccagctgtatagcttccatttcctgggcagcacagaatgcttcctgtacacagtgatgagctacgacagatacctggccatttcttaccccttgcggtacaccagcatgatgtctggaagaacctgtgccctgctcgccaccagcacatggctgagcggctccctgcactctgctgtgcagacaaccctgacatttcggctgccttactgcggccctaaccagatccaacactacttctgcgacgccccacctatcctgaaactggcttgtgctgataccagcgccaatgagatggtgatctttgtgaacatcggcgtggtcgccagcggctgcttcctgctgattgtgctgagctacgtgtccatcgtgtgcagcatcctgaagatccggacctccgagggcagacacagagccttccagacctgcgccagccactgcatcgtggttctgtgctttttcgtgccttgtgtctttatctatctgagacctggatctagagatgctgttgacggcgtggtggctgtgttctacaccgtgctgacccctctgctgaaccccgtggtgtacacccttcggaacaaggaagtgaagaaggccctgctgaaactgaaggacaaggtggcccacagccagggctga

SEQ ID NO: 736 - DNA, 948 bp, Artificial Sequence
  OR10H1 consensus-c
atgcagggcgctaatcactctaccgtgacagagttcatcctgatcggatttagcacctttcctcacctgcaactgatgttcttcctgctgttcctcctgatgtatctgtttaccctgctgggcaacctgctgatcatggccaccatctggtccgagcggagcctgcacacccctatgtacctcttcctgtgcgccctgtccatcagcgaaatcctgtacaccttcgctatcatccctagaatgctggccgatctgctgagcactcagagaagcatcgcctttctggcatgcgcttctcagatgttcttctccttcacattcggcttcacacacagctttcttctgacagtgatgggatacgacagatacgtcgccatttgtcatcctctgagatacaacgttctgatgagccctcggggctgtgcctgcctggtggcctggtcctgggccggcggcagcgtgatgggcctggtcgtgacctctgccatcttccacctgaccttctgcggccccaacgagattcaccatttcgcctgtcacgtgccccccctgctgaaactggcctgcggagatgacgtgctggtggtggccaagggcgtgggactcgtgtgcatcaccgctctgctcggctgcttcctgctgatcctgctgagctacgccttcatcgtggccgccatcctgaagatccccagcgccgagggcagacacaaggccttcagcacctgcgccagccacctgaccgtggtggtggtgcactacggctttgcctctgtgatctacctgaagcctaagggccctcagagcctggaaggcgacaccctgatgggcatcacatacacagtgctgacaccattcctgtctccaatcatcttcagcctgcggaacaaggaactgaaagtggctatgaaaaagaccttcctgagcaagctgtaccctgagaagaactga

SEQ ID NO: 737 - DNA, 951 bp, Artificial Sequence
  OR10H2 consensus-c
atgctgggcctgaaccacaccagcgtgtccgagttcatcctggtgggcttcagcacattccctcacctgctgctgcctatgtttttcctgctgtttctgctcatgtacctgttcaccctgctcggaaatctgctgatcatggccaccgtgtggtccgaacggagcctgcacacccctatgtacctgttcctgtgcgctctgtctatcagcgagatcctgtacacagtggccatcatccccagaatgctggccgacctgctgagcacccacagaagcatcgccttcctggcttgtgccagccagatgttcttcagctttaccttcggctttacacacagcttcctgctgaccgtgatgggctacgacagatacgtggccatctgccaccccctgcggtacaacgtgctgatgtctccaagaggctgcgcctgcctggttgcttggagctgggccggcggaagcgtcatgggcctggtggtcaccaccgccatcttccacctgacattctgcggccctaacgagatccaccacttcctgtgtcacgtgccacctctgcttaaactggcctgcggaaacaacgtgcctgctgtggccctgggtgttggcctggtctgcatcaccgctctgctgggatgtttcctgctcatcctgctctcttatgcctttatcgtggccgccatcctgaagatccctagcgccgagggcagacataaggccttctctacatgcgcctctcacctgatcgtggtgatcgtgcactacggcttcgccagcgtgatctacctgaagcccaagggcccccattctcaggagggcgatacactgatggccattacatacaccgtgctgacccctttcctgagccctattatcttcagcctgcggaataaggaactgaaggtggcaatgaaaaagaccttcctgagcaagctgtactccagcggcacctga

SEQ ID NO: 738 - DNA, 951 bp, Artificial Sequence
  OR10H3 consensus-c
atgcccggccagaactacagcacagtctccgagttcatcctgagcggctttagcaatttccctcagcacctgctgcctgtgttctttctgctgtacctgctgatgtatctgttcaccctcctcggcaacctgctgatcatggctaccatctggagcgagcggagcctgcacacccctatgtacctgttcctctgcgctctgagcatttctgaaatcctgttcaccgtggccgtgacccctagaatgttggtggatatgctgtctacacacagaagcattacattcgtggcctgcgcttctcagatgttcttcagcttcacattcggcttcacccattctttcctgctgatgatcatgggctacgacagatacgtggctatctgccaccccctgagatacaacgtgctgatgagcacaaggggctgtgccagactggtcagctggacctgggccggcggatccgtgatgggcatgatggtgacactgatcgtctttcacctgacattttgcggctccaatgtgatccaccacttcctgtgccatgtgctgtccctgctgaagctggcctgtggcaaagagacaagcagcgtgaccctgggagtgatcctggtgtgcgtgacagccctgatgggatgtctgtttctgatcgtgctgagctacgtgttcatcgtggccgccatccttcggatccccagcgccgagggaagacacaagacctttagcacctgcgtgtcccacctgaccgttgtgatcgtgcactacggcttcgccagcatcatctacctgaaacctaagggcccccacagcatggacagcaacaccctgatggccaccacctacaccgtgttcaccccattcctgtctcctatcatcttcagcctgcggaacaaggaactgaagaacgccatcaagaagagcttctgcagaaagttcagccctctgagttcttga

SEQ ID NO: 739 - DNA, 951 bp, Artificial Sequence
  OR10H4 consensus-c
atgcctagccagaactacagcatcgttagcgagttcatcctgtttggattttctgccttcccccagcacctgctgcctatcttcttcctgctgtacctgctgatgtatctgtttaccctgctcggcaacctgctgatcatggccacaatctggatcgagcacagcctgcacacccctatgtacctgttcctgtgcgccctgagcatctctgagatcctgttcaccgtagccatcacccctagaatgctggtggacatgctgtctacacaccactctattaccttcgtggcctgtgctagccagatgttcttctccttcacattcggctttacccacagctttctgctgatgatcatgggctacgaccggtacgtggccatctgccatcctctgaggtacaacgtgctgatgagcacaagagattgcgccagactcgtcagctggacatgggccggcggatctgtgatgggaatgatggtgaccctgatcgtgttccacctgaccttctgtggcagcaatgtgatccaccatttcttctgccacgtgctgagcctgctgaagctggcctgcggcaaggaaaccagcagcgtgacactgggcgtgatcctggtgtgcgtgactgccctgatgggctgcctgttcctgatcatcctgtcatatgtgttcatcgtggctgctatcctgcggatccccagcgctgaaggcagacacaagacctttagcacatgtgtgtcccacctcaccgtggtggtggtccactacggcttcgccagcatcatctaccttaagcctaagggccctcacagcatggactctaataccctgatggccaccacctacaccgtgttcacaccattcctgtccccaatcattttcagcctgcggaacaaggagctgaaaaacgccatcaagaaaagcttctacagaaagttctgccccctgtccagctga

SEQ ID NO: 740 - DNA, 948 bp, Artificial Sequence
  OR10H5 consensus-c
atgctgggcctgaaccacactagcgtaagcgagttcatccttgtgggatttagcgccttcccccacctgcagctgatgctgttcctgctgttcctactcatgtacctgttcaccctgctgggcaatctgctgatcatggccacaatctggagcgaacggagcctgcacacccctatgtacctgttcctgtgcgccctgagcatcagcgagatcctgtatacagtggctatcatccccagaatgctggctgatctgctgtctacacaaagaagcatcgctttcctcgcctgcgccagccagatgttctttagcttcacattcggcttcacccactcttttctgctgaccgtcatgggctacgacagatacgtggccatctgccaccccctgcggtacaacgtgctgatgagccctagaggctgtgcttgtctggtgggctgttcctgggccggcggatctgtgatgggaatggtggtgacaaccgccatctttcacctgaccttctgcggccctaacgagatccaccacttcttctgccatgtgcctccactgctgaagctggcttgtggggacgacgtgctggtggtggccaagggcgtgggcctggtctgcatcaccgccctgctgggatgcttcctgctgatcctgctgagctacgcctttatcgtggccgccattctgaaaatcccttctgccgagggcagaaacaaggccttcagcacctgcgcctcccacctgaccgtggtggttgtgcactacggcttcgcctctgtgatctacctgaagcccaagggcccacagagcctggaaggcgatacactgatgggcatcacctacaccgtgctcacacctttcctgtcccctattatcttcagcctgcggaacaaggaactgaaggtggccatgaaaaagaccttcttcaccaagctgtttcctcagaattgctga

SEQ ID NO: 741 - DNA, 939 bp, Artificial Sequence
  OR10P1 consensus-c
atggccggagagaaccagacattgcccgagttcctgctgctcggcttctccgacctgcgggccctgcagggacctctgttttgggtggtgctgctggtctacctggtgaccctgctgggcaacagcctgatcattctgctgactcaggccagccccgccctgcactcccctatgtacttcttcctgaggcacctgagcgtggtcgagctgctgtacacaacagacatcgttccaagaaccctggccgatctggcctctccacaccctcaagctatctccttccagggatgtgccgctcagatgtacgtgttcatcgtgctgggcatcagcgagtgctgcctgctgaccgccatggcttatgatagatacgccgccatctgcagacctctgcactacagcacactgatgtctcctagagcttgtatggccatggtgggcacaagctggctgatgggcatcatcacagccacaacccacagctctctgatcttcaccctgccttttccaagccaccccatcattcctcatttcctgtgcgacatcctgcctgtgctgcggctggctagcgccggcaaacacagaagcgaaatctctgtgatgaccgccaccgtggtgttcatcatggtccccttcagcctgatcgtgaccagctacgccagaatcctgggcgccatcctcgccatggccagcacccagagcagaagaaaggtgttttctacatgcagcagccacctgctggtggtgtccctgttcttcggcaccgcctccatcacctacatccggcctcaggccggcagcagcgtgacaaccgacagaatcctgtctcttttttacaccgtgatcacccctatgctgaatcctatcatctacaccctgcgcaacaaggaagtgcggggcgctctgagacacatggtgaagcggcaggtgcccagcccttga

SEQ ID NO: 742 - DNA, 969 bp, Artificial Sequence
  OR10S1 consensus-c
atgaccatgacaaccgaaaaccctaaccagaccgtggtctcccacttcttcctggagggcctgatgtacaccgccgagcaccccagcctgttcttcctgctgtttctgctgatctacagcatcacagtgacaggcaacctgctgattctgctgaccgtgggcagcgatcctcacctgagctctccaatgtaccactttctgggccacctgtcttttctcgacgcctgtctgagcacagtgaccgtgcctaaggtgatggccggactgctgacactggacggcaaagtgatcagcttcgagggctgcgccgtgcagctgtactgttttcacttcctggcttctaccgagtgcttcctgtacacagtgatggcttatgatagatacctggctatctgccagcctctgcactaccccgtcgccatgaatagaagaatgtgcgccggactggcaggaatcacctgggccatcggcgccgtgcacagcgccatccacacatccctgacattccggctgctgtactgcggcccttgccacattgcctacttcttctgcgacatccctcctgtgctgaagctggcctgcgccgacaccaccatcaacgagctggtgatgctagccaatatcggcatcgtggccgccggttgtctgatcctgatcgttatcagctacgtgttcatcgtggctgctgtgctgagaatcagaaccgcccagggcaggcaaagagccttcagcacctgtacagcccatctgaccgtcgtgctgctctactacgtgccccccgtgtgcatctatctgcagcctagaagcagcggcgccggcgctggagcccctgccgttttctacaccatcgtgacccctatgctgaaccccttcatctacaccctgagaaacaaggaagtgaagcgggccctgcggagactgctgtgcagcggctcccgggaaagccccgccggctctcctccaccatga

SEQ ID NO: 743 - DNA, 924 bp, Artificial Sequence
  OR10V1 consensus-c
atggaaggcatcaacaagaccaagatccagttcttcttcagacccttcagccctgatcctgaggtgcagatgctgatctttgttgcttttctgatgatgtacctaacaagcctgtccggaaacgccacaatcgccctgatcgtccaaatcaaccacagcctgcacacccctatgtacttcttcctggcaaatctggccgtgctggaaatcttctactcctccagcatcgcccctctggccctcgctaatctgctgagcatgggcaagacccctgtgtccatcacaggatgtggcacccagatgttctttttcgtgttcctgggcggcgccgactgcattctgctggccgtgatggcctacgacagattcgtggctatctgccatcctctgcggtacaccctgatcatgagctggtccctgtgcgtcgaactgctggtgggatctctcgtgctgggcttcctgctgagcctgcccctgaccatcctgatcttccacctgcctttctgccacaacgacgagatctatcacttctactgcgacatgcctgccgtgatgagactggcttgtgccgataccagagtgcacgagacagccctgtacatcgtgtcttttatcgtgctgagcattcctctgtctctgattagcatcagctacgtgttcatcgtggccgccatcctgagaatcagaagcgccgagggccggcacagagcctttagcacctgtagcagccacctgacagtggtcctgttgcagtacggctgcaccagcttcatctacctgtctcccagcagctcttattctccagagatgggcagagtggtgagcgtggtgtacacatttatcaccccaatcctgaaccccctgatctacagcatgcggaacaaagagctgaaggacgccctgcgggccctgaggaagttctga

SEQ ID NO: 744 - DNA, 945 bp, Artificial Sequence
  OR10W1 consensus-c
atgacttggggaaatcacagcgtgctgatggagttcgtgttcctggcttatcctagctgtcctgagctgagaatcctgtccttcctgggcgtgtccctggtctacggcctgatcatcaccggcaacgtgctgatcgtggtggctatccagaccgaggccagactgcacaccccaatgtactacttcctgggcagcttatccggcgtggaaatctgctacaccgccgtggtggtcccccacatcctggccaacaccctgcaatctgaaaagaccatcaccctgctgggctgtgcaacacagatggccttcttcatcggactgggatctgctgattgcttcctgctggccgctatggcttacgaccggtacgtggccatttgtcaccctctgcaataccccctgatcatgacactcaccctgtgcgtgcggctggtggtggccagcgtggtcatcggcctgttcctgagcctgcagctggttgcttttatcttcagcctgcctttctgtcaggccaggggcatcgagcacttcttctgcgacgtgcctccagtgatgcacctggtgtgcgcccagagccacatccacgagcagagcgttctggtggccgccaccctggccatcgccgtgcccttctttctgatcgccacaagctacgcctttatcgtggccgccgtgctgaagatccattctgccgccggccgccacagagcctttagcacctgcagcagccacctgacagtggtgctgctgcagtacggctgctgcgccttcatgtatctgcggccttctagcagctacaaccctaagcaggaccagttcatttcactggtgtacaccctgggaacacctctgctcaaccccctcatctacacactgagaaacagcgagatgaaaggcgccatcggcagagtgctgaccagaaattgcctgtctcagaacagctga

SEQ ID NO: 745 - DNA, 954 bp, Artificial Sequence
  OR10AD1 consensus-c
atggacctgagaaatagcagcacagtgaccgagttcatcctggtcggcttcgagcagtctagcccatctacccgggccctgctgttcgccctgttcctggccctgtacagcctggccatggccatgaacggactgatcatcttcatcacctggaccgaccccagactgaacagcccaatgtacttcttcctgggccacctgtcttttctggacgtgtgcttcatcaccacaaccatcccccagatgctgatccacctggtggtcaagaaccatacagtgtccttcgtgtcctgtatgacccagatgtacctggtgttctgcgtgggcgtggctgagtgcatcctgctggcttttatggcctacgacagatacgtggccatctgccaccctctgtcctatgcccagatcatgagccagcaggtgtgtgtgcggctggtgtctaccgcctggttcttcggactgattaacggcatcttcctggaatacatgagcttcagggaacctttttgtagagataaccacatcgagaacttcttttgcgaggcccctatcgtgatcgccctgagctgcggcgaccctcaatttagcctgaaggccatcttcgctgatgccatcgtggtgctgctgagccccatggtcctgatcgttatcagctacgccagaatcctggccagtatcctcggaagagctagctctagcggcagaggcaagaccttctctacatgcgccagccacctgaccgtggtgatctttttctacacaagcgccatgttcagctacatgaatcctcggagcacccacggccctgataaggacaaacctttcagccttctgtatacaatcattacccctatgtgcaaccccatcatctacagcttcagaaacaaggaaatgaaaggcgccatggtgcgggctctgggcagaacctccctggcacaggccgagagcgtgtga

SEQ ID NO: 746 - DNA, 951 bp, Artificial Sequence
  OR10AG1 consensus-c
atggagaaccagctgaagaccgaggaatctaacctgacaacactgatggagttcgtgctgctgggcttcagcgacatccctaacctgcagtggatgctttttggaatcttcctcctgatttatctgaccatcctgatgtgcaatagcatcatcatcctgatcacaaggatcgaccccgccctgcagaccccaatgtacttcttcctttccaacttcagcttcctggaaatctgctacgtgaccgtgaccatcccgcggatgctgatggacctgtggacccaaaaaggcaacatctccctgttcgcctgcgccacccagatgtgcttcgtgctgatgctgggcggcaccgagtgcctgctgctcacagtgatggcctacgacagatacgtggctatctgtaatcctctgcactaccctctggtgatgaaccataaggtgtgcatccagctggtcatcgccagctggatctctggcatccccgtggtgatcggccagacctgccagatcttttctctgcctttctgcggcagcaataccatcaaccacttcttctgtgatatccctcctatcctgaagctggcttgtggagataccttcgtgaacgagatcaccgtgtacgtcgtggccgtggtttttgtgatggtcccctttctgctgatcgtggtgtcctacggcaagattatcagcaacatcctgaaactgtctagcgccagaggcagagccaaggccttcagcacctgtagcagccacctgatcgtggtggtgctgttctacggcactgccacaattacatacctgcaacctaagcccaaccagagcgagggcatgggaaagctgctgagcctgttttataccatcctcacacctacactgaacccaattatctacaccctgagaaacaaggacatcatggtggccctgcggaaactgctggctaagctgctgacctga

SEQ ID NO: 747 - DNA, 930 bp, Artificial Sequence
  OR11A1 consensus-c
atggaaatcgtctccaccggcaaccagacaatcaccgagttcgtgctgctgggcttttacgacatccctgagctgcactttctgtttttcatcgtgttcaccgtggtgtacgtgttcatcattatcggcaatatgctgatcatcgtcgccgtggtgtctagccagagactgcacacccctatgtacttcttcctggccaacctgagcttcctggagatcctgtatacaagcacagtggtcccaaagatgctggaaggcttcctgcaggaggccaccatttctgtggccggatgtctgctgcaatttttcatcttcggctccctggctacagccgagtgcctgctcctggctgttatggcctacgacagatacctggctatctgctaccctctacactaccccctgctgatgggacctagacggtgcctgggactggtggtgaccacctggctgtccggcttcgtggtggatggcctggtcgtggctctgatggctcagctgagattctgcggccctaaccacatcgatcacttctactgcgacttcatgcctctggtgggcctggcctgcagcgaccccagcgtggcccaggtgacaaccttcatcctgtctgtgttttgcctgacagtgccattcggcctgatcctgaccagctacgccagaatcgtggttgccgtgctgagagtgcccgccggcgccagcagacggaaagccttcagcacctgtagcagccacctggccgtggtgtctacattctacggcaccctgatgatcctgtatgtggcccctagcgccgtgcattctcagctgctgagcaaggtgttcagcctgctgtacaccgtggtgacccctctgttcaaccccgtgatctacaccctgcggaacaaggaagtgcaccaggccctgcgcaagatcctttgtatcaagtga

SEQ ID NO: 748 - DNA, 948 bp, Artificial Sequence
  OR11H2 consensus-d
atgaacgtgtctgagcctaattctagtttcgccttcgtgcgggagttcatcctgctgggattcagctgcgagtggaagatccagatcctgctgttttctctgttcacaaccacctacgcccttacaatcacaggcaacggcgctatcgtgtgcgccctgtggtgcgaccaaagactgcacacccctatgtacatcttcctgggaaacttcagctttctggagatctggtacgtgtccagcaccgtgccaaagatgctggtgaacttcctttctgaaaagaaaaccatcagcttcgctggatgtttcctgcagttctacttcttctttagcctgggcaccagcgagtgcttcctgctggccgtgatggccttcgacagatacctggccatttgtagacctctgcactaccccaacatcatgaccggccatctgtgcaccaagctggttatcatctgctgggtgtgcggcttcctgtggttcctgattcccatcgtgctgatcagccagatgcctttctgcggcccaaacatcatcgaccacgtggtgtgtgatcctggccctctgttcgccctggcatgcgtgtccgcccctagaacccagctgctgtgttacaccctgagcagcctggtgatcttcggcaatttcctgtttatcctgggctcatatacactggtcctgctggctgtgctgcggatgcccagcgccaccggcaggcacaaggcctttagcacatgcggcagccacctggccgtggtgagcctgttttatggcagcctgatggtcatgtacgtgtctcccggcctgggccactccgccggcatgcagaaagtggccacactgttctacgccatggtgacccctctgttcaaccccctcatctacagcctgcggaacaaggaaatcaaggccgctctgagaaaggtgctgggatccagcaacatcatctga

SEQ ID NO: 749 - DNA, 927 bp, Artificial Sequence
  OR12D2 consensus-c
atgctgaatcaaacaagcgtgacagagttcctgctgctgggcgtgactgatattcaggagctgcagcctttcctgtttgtggtgttcctcaccatctacttcgtgaacgtggctggaaacggcgctatcctgatgatcgtgatctctgatcccagactgcactccccaatgtactttttcctgggcaatctgtcttgtctggacatctgctacagcacagttaccctgcctaagatgctggaaaacttcctgagcacccacaaagccattagcttccttggctgtatcagccagctgcacttcttccacttcctgggaagcaccgaggccatgctgctggctgtgatggccttcgacagattcgtggctatctgcaagcctctgcactacacagtgatcatgaaccaccagctgtgcacccagatggccgtgaccatctgggtcatcggcttcttccatgccctgctgcacagcgtcatgaccagcagactgaacttctgcggcagcaaccacatccaccacttcttttgcgacgtgaagcccctgctggaactggcctgcggcaacaccgagctgaaccagtggctgctgaacaccgtgacaggcacaatcgccatgggccccttcttcctgaccctgctctcctacttctacatcatcacatacctgttttttaagacccacagctgttctatgctgcataaggccctgtccacatgcgcctctcactttatggtggtcatcctgttctacgcccctgtgctgttcacctacatcagacctgccagcggcagcagcatggaccaggaccggatcatcgccatcatgtatagcgtggtgacccctgtgcttaatcctctgatctacaccctgagaaacaaggaagtgaaaggcgccctgggaagagtgatccggcggctgctgtga

SEQ ID NO: 750 - DNA, 948 bp, Artificial Sequence
  OR12D3 consensus-c
atggaaaacgtgaccacagtgaacgagttcctgctcctgggcctgacctccgtgcaggagctgcaacctttctttttcgtgattttcctgatcatctacctgatcaacctgatcggcaatggcgccatcctcgtgatcgtgatcctggaacctcagctgcattctccaatgtacttcttcctgggcaacctttcttgtctggatatctgctacagcagcgtcaccctgcctaagctgctggtgaacctgctgagcaccagacgggccatcagcttcctgggatgtatcacccagctgcacttcttccactttctgggaagcaccgaggccatcctgctggccatcatggccttcgacagattcgtggctatttgcaaccccctgagatacacagtgatcatgaacccccaagtgtgcatcctgctggccgccgtggcctggctgacctccttcttctacgccctgatgcactctgtgatgaccgccaggctgaacttctgccactcacagaaactgaatcacttcttttgtgatgtgaagccactgctggagctggcctgcggcgacaccctgctgaaccagtggctgctgagcatcgtgacaggcagcatcagcatgggcgcttttttcctcacactgctgtcctacttctacatcattggcttcctgctgttcaagaaccggagctgcagaatcctgcacaaggccctgagcacatgcgccagccacttcatggtggtgtgcctgttttacggacctgtgggctttacctacatcagacctgccagcgccacaagcatgatccaggaccgcatcgttgctatcatctattctgccgtcacccctgtgctgaatcccctgatctacaccctgcggaacaaggaagtgatgctggctctgaagaaaatcttcggcagaaagctgttcaaggactggcagcagcactga

SEQ ID NO: 751 - DNA, 927 bp, Artificial Sequence
  OR13A1 consensus-c
atgagcaaccagaccctggtgaccgagtttatcctgcagggcttcagcgaacaccccgagtacagagtgctgctgtttagctgttttctaagcctgtacagcgtggccctgaccggcaacgtgctgatcatcctggctatcaccttcaatccaggcctgcacacccctatgtacttcttcctgttcaacctggcaaccatggacatcatctgcacaagcagcatcatgcctaaggctctggccggactggtcagcgaggaaaacagcatcagctacggcggctgtatggcccaactgtacttcctgacctggagcgcctcttccgagctgctgctgctcaccgtgatggcctacgacagatacgccgctatttgccatcctctgcactacagcactatgatgtccaaggtgttctgctcaggcctggccaccggagtgtggctgttgtgcgccttcaacaccgccatccacacaggcctgatgctgcggctggacttctgcggccctaacgtgatcacccacttcttctgtgaagtcccccccctgctgctgctcagctgctccagcacatacgtgaatagcattatgatcgttctggccgatgccttctacggcatcctgaacttcctgatgaccatcgtgtcttatggatttatcatctcttctatcctgaaaatgaggaccgctgagggcaagcagaaggccttttctacatgcagcagccacctgatcgtggtgtgcatgtactacacagccgtgttctacgcttacatcagccctgtgtccagctactccgccgagaaaagcaagctggccggcgtgctgtatacaatgctgtctcctaccctgaatcctctgatctacacactgcggaacaaggaagtgaaggccgccctgagaaagctgttccccttcttcagaaactga

SEQ ID NO: 752 - DNA, 957 bp, Artificial Sequence
  OR13C2 consensus-c
atggaatgggagaaccagacaatcctggtggagttcttcctgaagggcctgagcggctaccccagactggaactgctgttcttcgtgctgatcctgatcatgtacgtggtgatcctcctgggaaatggcacactgatcctgatctccatcctggacagccatctgcacacaccaatgtatttctttctgggaaacctgagcttcctggacatttgttacaccaccaccagcatccccagcaccttagtgtccttcctgtctgagagaaagaccatcagcttttctggctgcgccgtgcaaatgttcctgggcctggccatgggcaccaccgagtgcgtgctgctgggcatgatggcctttgatagatacgtggccatctgcaatcctctgagatacccagtgatcatgagcaaggactcttatgtccccatggctgccggcagctggatcattggcgtggtgaactccgccgttcagaccgtgttcgtggtgcagctgcctttctgcagaaacaacgtgatcaaccacttcagctgcgagatcctggccgtcatgaagctggcttgtgctgatatctctggaaatgagttcatcatgctggtggccaccacactgtttatcctgactcctctgctgctgatcatcatcagctacaccctgatcatcgtgagcatcctaaagatccggagcagcgagggcagaagcaaggtgttctctacatgcagcgcccacctgaccgtggtgatcattttttacggcaccatccttttcatgtacatgaaacctaagagcaaagagacactgaacagcgacgacctggatgccacagacaagctgatctctatgttctacggcgtgatgacccctatgatgaaccctctgatctactccctgcggaacaaagacgtgaaggaagccgtcaagcacctgctgagacggaggttcttcaacaagtga

SEQ ID NO: 753 - DNA, 954 bp, Artificial Sequence
  OR13C3 consensus-c
atggacaagatcaaccagaccttcgtgtccgagttcctgctgctcggactgtccggctaccccaagatcgagatcatctacttcgccctgatcctggtcatgtacctggtgatcctgatcggaaatggcgtgctgatcatcgcctctatctttgacagcagactgcacacccctatgtacttctttctgggcaacctgtcctttctggacatctgctacacatcttctagcgtgcctagcaccctggtgtctctgattagcaaaaagcggaacatctcattcagcggctgtgctgtgcaaatgttcttcggcttcgccatgggcagcaccgaatgtctgctgctgggcatgatggcttttgatagatacgtggccatctgcaaccccctgcggtacccaatcatcatgagcaaggtggtctacgttctgatggccagcgtgagctggctgagcggcggaatcaacagcgccgtgcagaccagcctggctatgcggctgcctttctgcggcaacaacatcatcaaccacttcacatgcgagatcctggccgtgctgaagctggcctgcgccgacatcagcctgaatatcattacaatggtgatctctaatatggccttcctggtgctgcctctgctggtgatcttcttcagctacatgttcatcctgtacaccatcctgaggatgaacagcgctacaggcagaagaaaggcctttagcacctgcagcgcccacctgaccgtggtgatcatcttctatggaacaatcttcttcatgtacgccaagcctaagtcccaggatctgatcggcgaagataagctgcagaccagcgacaaactgatcagcctgttctacggcgtggtgacccctatgctcaaccctatcatttattctctgagaaacaaagacgtgaaggccgccgtgaagtaccttctgaacaagaaacccatccagtga

SEQ ID NO: 754 - DNA, 957 bp, Artificial Sequence
  OR13C4 consensus-c
atggacaagatcaaccagaccttcgtgcgggagttcatcctgctgggcctgagcggttatcctaagctggaaatcatctttttcgccctgatcctggtgatgtacctggttatcctgatcggcaacggcgtgctcatcatcgcttctatcttcgatagcagactgcacaccccaatgtatttcttcctgggcaatctgagcttcctggatatctgctacacctctagcagcgtgcccagcaccctggtgtctctgattagcaagaagagaaacatctccttcagcggctgcgccgtgcagatgttcttcggcttcgccatgggcagcacagagtgttttctgctgggaatgatggcttttgatagatacgtggccatctgcaaccctctgagataccctattatcatgagcaaggtggtctacgtgctgatggccagcgtgtcctggctgagcggcggaatcaatagcatcgtgcaaacaagcctggcaatgcggctgcccttctgcggcaacaacatcatcaaccacttcctgtgcgagatcctggctgtgctgaagctggcctgcgccgacatcagcctgaacatcgtgacactggctgtgtccaacatggcctttctggtcctccccctgctggtcatcttcttcagctacatgttcatcctgtacaccatcctcagaatgaacagcgccaccggcagacggaaagccttcagcacctgttctgcccacctgacagtggtgatcattttctacggcaccatcttctttatgtacgccaagcctaagtctcaggacctgctgggaaaagacaacctgcaggccacagagggcctggtttccatgttctacggcgtggtgacccctatgctgaatcctatcatctacagcctgcgcaacaaggacgtgaaagccgccgtgaagtacctgctgtctagaaaggccgtgaaccagtga

SEQ ID NO: 755 - DNA, 957 bp, Artificial Sequence
  OR13C9 consensus-c
atggaatgggagaaccagacaatcctggtggagttcttcctgaaaggcctgagcggctaccccagactggaactgctgttttttgtgctgatcctgatcatgtatgtggtgatcctgctgggcaatggcacactgatcctgatctctattctggacagccacctgcacacccctatgtacttcttcctgggaaatctgtcttttctggatatctgctacaccacaacaagcatccccagcacactggtcagcttcctgagcgagaggaagaccatcagcttcagcggatgtgcagttcagatgttcctcggcctggccatgggcaccaccgagtgcgtgctgctgggcatgatggcttttgatagatacgtggccatctgcaaccccctgcggtaccctatcatcatgagcaagaacagctacgtgccaatggccgccggcagctggttcgccggagtggtgaactccgccgtgcagaccaccttcgtggttcaactgcctttctgccggaacaacgtgatcaaccacttcagctgcgagatcctggccgtgatgaagctggcttgtgccgacatctctggcaacgagttcatcatgctggtggctacaaccctgttcaccctgatgcctctgctgctgattgtgatctcttattctctgattatctcatccatcctgaagatcagaagcagcgagggcagatctaaagccttcagcacctgcagcgcccatctgaccgtggtcatcatcttctacggcaccatcctttttatgtacatgaagcctaagtccaaggaaactcttaatagcgacgacctggacgccaccgataagctgatctccatgttctacggcgtgatgacaccaatgatgaaccctctgatctacagcctgagaaacaaggacgtgaaagaggccgtgaagcacctcctgaaccggagattcttctccaagtga

SEQ ID NO: 756 - DNA, 960 bp, Artificial Sequence
  OR13F1 consensus-c
atgttccccgccaactggaccagcgtgaaggtgttcttcttcctgggcttcagccactaccccaaggtcgaggtgatcatcttcgtgctgtgcctgctgatgtatctgattacactgctgggcaatatcattcttatctccatcactatcctggacagccatctgcacacccctatgtactttttcctgtctaatctgtcttttctggatatctggtatacatctagcgccctgacccctatgctcgctaatttcgtgtccggcaagaacaccatcagctttagcggatgtgccacccagatgtacttcagcctggccatgggcagcaccgagtgcgtgctgctgagcatgatggcctacgacagatacgtggccatctgcaaccctctgcggtaccctatcattatgaacaagcgggtgtgcgtgcaaatcgccgccggaagctgggtcacaggctgcctgaccgctctggttgagacagtgtccgttctccagctgtctctgtgcggcaacagcatcatcaaccacttcacctgtgaaatcctggctgtgctgaaactggtgtgcgtggacacctccctggtgcagctgatcatgctggtgatcagcgtgctgctgctgcctatgcctatgctgctgatctgtatcagctacgcctttatcctgagcaacatcctgagaatcagcagcgtggacggcagaagcaaggccttctctacatgcgctgctcacctgacagtggtggtgctgttctacggcaccgccctgagcatgtacctgaaaccttctgccgtggatagccaggagatcgacaagttcatggccctggtctacgccggcctgacccccatgctcaacccaatcatctacagcctgaggaacaaggaagtgaaggtggccgtgaaaaagctgctgatcagaaaccccttcaacaccgccctgatctctatcctgaagtga

SEQ ID NO: 757 - DNA, 942 bp, Artificial Sequence
  OR51A2 consensus-d
atgagcatcattaacaccagctacgtcgaaatcaccacattcttcctggtgggcatgccaggcctggaatacgcccacatctggatctccatccccatatgcagcatgtatctgatcgccatccttggcaactgcacaatcctgttcatcatcaagaccgagcccagcctccacgagcctatgtactacttcctgagcatgctggccatgagcgacctgggcctgtctctgagctctctgcctaccatgctgagaatctttctgttcaacgctcctgagatcagcgccaacgcctgcttcgcccaggagttctttatccacggattcaccgccctggaaagcagcgtgctgctgatcatgagcttcgacagattcctggccatccacaaccctctgagatacagcagcatcctgacaaccgtgagggtggctcagatcggaatcgtgttcagctttaagtccatgctgctggttcttccattccctttcaccctgcggagcctgaagtactgcaagaagagccaactgtcccattcttattgcctgcaccaggacgtgatgaaactggcttgtagcgataaccggatcgatgtgatctacggctttttcggcgccctgtgtctgatggtggacttcatgctgatcgccgtgtcttacatcctgatcctgaaaaccgtgctgggcatcgcctctcagaaagagcagctgaaggccctcaatacctgcgtgtcccacatctgcgccgtgatcattttctacctgcctatcatcaacctggctattgtgcacagattcgccggccacgtgtcccctctgtttaacgtgctgatggctaatgtgctgctgctggtcccccccctgatgaaccctatcgtgtactgtgtgaagacaagacagatcagagtgcgggtcgtggccaagctgtgccagaagcagatctga

SEQ ID NO: 758 - DNA, 942 bp, Artificial Sequence
  OR51A4 consensus-c
atgagcatcatcaatacctcttacgtggaaatcaccacattcttcctggtgggaatgcctggactggagtacgcccacatctggatctctatccctatctgcagcatgtacctgatcgctatcctgggcaactgcacaatcctgttcatcattaagacagagcctagcctgcacgagcctatgtactatttcctgagcatgctggccatgtctgatctgggcctgagcctgagcagcctgccaacaatgctgcggatctttctgttcaacgcccctgagatcagcgccaatgcctgcttcgcccaggagttcttcatccacggcttcaccgccctggaaagcagcgtgctgctgatcatgagctttgatagattcctggccatccacaaccccctgcgctactccagcatcctcaccaccgtgcgggtggctcagatcggcatcgtgttcagcttcaagtccatgcttctggtgctgcctttccccttcacactgagaagcctgaagtactgtaaaaagagccaactgtctcacagctactgcctgcaccaggacgtgatgaagctggcctgtagcgacaacagaatcgacgttatctacggcttttttggcgccctgtgcctgatggtggacttcatgctgatcgctgtgtcttatatcctgatcctgaaaaccgtgctcggcatcgccagccagaaggaacagctgaaggccctgaacacctgcgtgtcccacatttgtgccgtgatcatcttctacctgcctatcattaacctggctatcgttcatagattcgctagacacgtgtcccctctgtttaacgtgctgatggccaacgtgctgctgctggtccccccccttatgaacccaatcgtgtactgcgtgaagaccagacagatcagagtgcgggtggtcgccaagctgtgccagaaacagatctga

SEQ ID NO: 759 - DNA, 930 bp, Artificial Sequence
  OR51A7 consensus-c
atgagcgtgctcaacaacagcgaggtgaaactgtttctgctgatcggcatccctggactggaacacgcccacatctggatcagcatccccatctgcctgatgtacctggttgccattctgggcaattgcaccatcctgttcgtgatcaagaccgagcccagcctgcatgagcctatgtactacttcctggccatgctggcagtgtccgatctgggactgagcttcagcagcctgcctacaatgctgaggatctttctgttcaacgccatgggcatcagccctaacgcctgttttgcccaggagttcttcatccacggcttcacagtgatggaaagcagcgtcctgctgatcatgagcctggacagattcctggccatccacaaccctcttagatacagctctatcctgacatctaatagagtggctaagatgggcctgatcctggccatccggtctatcctgctggtgctgcccttccctttcaccctgaaaagactgaagtactgtcagaagaacctgctctctcacagctattgcctgcaccaggacgtgatgaaactggcctgcagcgacaacaaggtgaacttcatctacggctttttcgtggccctgtgcaccatgctcgacctggccctgatcgtgctgagctacgtgctgatcctgaagacagtgctgtctatcgccagcctggctgaacggctgaaggccctgaatacctgcgtgtcccacatctgcgccgtgctgatcttctacgtgcctatcatcaccctggctgctatgcaccggttcgccaagcacaagtcccctctggtcgtgatcctgattgccgatatgttcctgctggttccaccactgatgaaccccatcgtgtactgcgtgaagaccagacaaatcagagagaaggtgctgggcaagctgtgtggcagatga

SEQ ID NO: 760 - DNA, 936 bp, Artificial Sequence
  OR51B2 consensus-c
atgtggcctaatatcagcgccgcccctttcctgctgaccggctttccaggcctggaagccgctcaccactggatcagcatccctttcttcgccgtgtacgtgtctgtgctcctcggcaatggcaccctgctgtacctgatcaaggacgaccacagcctgcacgagcctatgtactacttcctggccatgctggccggaacagacctgatggtgacactgaccaccatgcctaccgtgatgggcgtcctgtgggtcaaccacagagagatcagccatggcgcctgcttcctgcaagcctattttattcactctctgtctatcgtcgagagcggagttctgctggctatggcctacgacagattcatcgccatccggaaccctctgagatacgccagcatcctgacaaacaccagagtgatcaagctgggcctgggcgtgtttatgcggggcttcgtgtccatcctgcctcctatcctgcggctgttcagcttcccctactgtaaaagccacgtgctgagccacgccttctgcctgcaccaggatgtgatgaagctggcttgtgctgatatcaccttcaacagactgtaccccgtgatcctggtgtctctgacatttttcctggactgcctgatcatcctgttcagctacatcctgattctgaagaccgtgatgggcatcgccagcggcgaggaaagagccaaggccctgaacacctgcgtgtcccatatctcatgcgtgcttgtgttctacatcacagtgatcggactgaccttcatccaccggttcggcaagcacgtgccccacgtggtgcacatcacaatgagctatgtgtacttcctgttcccacctctgatgaaccccatcatctacagcattaaaaccaagcagatccagtacagcatcatcaggctgttttctaagcacagattcagctga

SEQ ID NO: 761 - DNA, 936 bp, Artificial Sequence
  OR51B4 consensus-c
atgtggtccaacaacagcgccgctcctttcctgctgaccggcttcctcggcagcgaggccatccaccactggatcagcatccccttcttcgtcatctacctgagcatcctgttcggcaacggcacactgctgttcctgatctggaacgaccactctctgcacgagcctatgtactacttcctggctatgctggctggcaccgacctgggaatgaccctgaccaccatgcctacagtgctcggagtgctgctgctggaccagcgggaaatcgcccagggcgcctgcttcacccagagctattttatccacagcctggcaatcgtggaaagcggcgtgctgcttgctatggcctacgaccggttcatcgccatccggacccctctgagatacaacagcatcctgacaaattctagagtgatgaagatcggactgggcgtgctgatgcggggctttgtgtccatagttcctccaatcctgcctctgtactggttcccctactgcagaagccacgtgctgtctcatgccttctgcctgcaccaggacgtgatgaaactggcctgtgccgatatcacattcaatagaatctatcctgtgatcctggtggccctgaccttcttcctggatgccctgatcatcatcttcagctacattctgatcctgaaaaccgtgatgggcatcgcctctggcgaggagagggccaaggccctgaacacctgcgtgtcccacatcagctgtgtgctggttttctacatcaccgtcatcggcctgacctttattcatagattcggaaagcacgccccccacgtggtgcacatcacaatgtcctacgtgtacttcctatttccaccttttatgaaccccatcatctacagcatcaagacaaagcaaatccagagatctatcatcagactgttcagcggccacagcagagcctga

SEQ ID NO: 762 - DNA, 939 bp, Artificial Sequence
  OR51B5 consensus-c
atgtggcctaatagcagctctcattcttttctgctgacaggctttcctggcctggaggccgctcaccactggatcagcgtgcccttcttcttcgtgtacatcagcgtgctgtttggcaatggcaccctgctgctgcttattaaggaagatcacaacctgcacgagcctatgtactacttcctggccatgctggctgctacagacctgggactgaccctgaccaccatgcctacagtgctgggcgtgctgtggctggatcacagagagatcggcagcgccgcctgcttcagccaggcctattttatccactccctgagcttcgtggaaagcggcgtgctgctggccatggcctacgacagattcatcgccatctgcaaccctctgagatacaccagcatcctgaccaacaccagagtggtgaaaatcggactgggcgtgctgatgcggggctttgtcagcgtggtccctcctatcagacctctgtatttcttcccctactgccacagccacgtcctgagccacgccttctgcctgcaccaggacgtgatcaagctggcttgtgccgacaccaccttcaaccggctgtaccccgtggttctcgtggtgctgatcttcgtgctggacagcctgatcatcctgatatcttacgtgctgatcctgaaaagcgtgttgtccatcgcctctagggaggaaagagccaaggccctgaacacatgcgtgtcccatatctgttgcgtgctggtgttctacgttacagtgattggactgtctctgatccaccggttcggcaagcaggtgcctcacatcgtgcacctgatcatgagctacgtgtacttcctgttcccaccactgatgaaccccatcatctacagcgtgaagaccaagcaaatccagaacggcatcctgcacctgttcaccacccacagaatcggcacatga

SEQ ID NO: 763 - DNA, 939 bp, Artificial Sequence
  OR51B6 consensus-c
atgtggctgaacaccagcgcctctccattcctgctcaccggcttccccggcatggaaaaggcccaccactggatcagcattcctctgctggtggtgtacatctccatcctgttgggcaacggtacactgctgttccttattcgggacgaccacaacctgcacgagcctatgtactactttctggctatgctggccgccaccgatctgggcgttacactgacaaccatgcccaccgtgctgggcgtgctgtggctgaaccacagagagatcggccacggcgcctgcttcagccaggcctattttatccacacactgagcatcgtggagagcggcgtgctgctggccatggcctacgacagattcatcgccatcagaaatcctctgcggtacacatctatcctgacaaacacccaagtgatgaaaatcggagtgggcgttctgaccagggccggcctgagcatcatgcctatcatcatccggctgcattggttcccttactgcagaagccacgtgctgtcccacgccttctgcctgcaccaggacgtgatcaagctggcttgtgccgatatcacattcaacagactgtaccccgtggtcgtggtgttcgccatggtgctgctggacttcctgatcatcttcttcagctacatcctgatcctgaagaccgtgatgggcatcgccagcggcgaggaaagagcaaaggccctgaatacctgtgtgtcccacatttgctgcatcctggtgttctacgtgaccgtggtgggactgaccttcatccaccggtttggcaagcacgtcccccacgtggtgcacatcaccatgtcttatatctacttcctgttcccacctttcatgaaccctgtgatctacagcatcaaaaccaagcagatccagagcggaatcctgagactgtttagcctgcctcattctagagcttga

SEQ ID NO: 764 - DNA, 975 bp, Artificial Sequence
  OR51D1 consensus-c
atgcagaagcctcagctgctggttcctgtgatggccacccctaatggcacactggtccaccccgcctacttcctgctggtgggcatccccggactcggccctaacatccacttctggctggcttttcctctgtgcttcatgtacgccctggccacactgggcaacctggcaatcgtgctgatcatcagagtggaaaggcggctgcacgagcctatgtatctgttcctggctatgctgtccaccatcgacctggtgctgagcagcgtgaccatgcctaagatggcctctctgtttctgaccggcatccaggagatcgagttcaacatttgtctggcccagatgttcctgattcacgccctgtccgccatggaatctgccgtgctgctcgccatggccttcgacagattcgtggccatctgccaccctctgcggcacgccagcgtgctgacaggccctacagtggctaaaatcggcctggccgccctgaccagaggcttcgtgttcttctttccactgcccttcatccttaaaagactgagctactgccagacccacaccgtcacccacagcttctgcctgcaccaggatatcatgaagctgagctgcacagataccacagtgaacgtggtgtacggcctgttcatcatcctgtccgtgatgggcgtggacagcctgttcatcggctttagctacatcctgatcctgagagccgtgctggagctgtctagcagaggagccgctctgaaggcctttaacacctgtatcagccacctgtgcgccgtgctggtgttctacgtgcctctgatcggactgtctgtggtgcacagactgggcggccccaccagcctgctccatgtggttatggctaatatctacctgctgctgcctccagtggtcaaccccatcgtgtacggcgccaagaccaaggaaatccggagccgggtgctgcatatgttcagccaaggcggaagatga

SEQ ID NO: 765 - DNA, 963 bp, Artificial Sequence
  OR51E2 consensus-c
atgagcagctgcaacttcacccacgccacattcgtgctgattggaatccctggcctggaaaaggcccacttctgggtcggcttccccctgctgagcatgtacgtggtggccgtgttcggcaactgcatcgtcgtgttcatcgtgcggaccgagcggagcctgcacgcccctatgtacctgttcctgtgcatgctggccgcaatcgacctggccctgtctacaagcacaatgcctaagatcctggctctgttctggttcgacagcagagagatcagcttcgatgcctgtctgacacagatgtttttcatccacgctctgtccgccatcgagagcaccatcctgctggccatggcctttgatagatacgtggccatctgccatcctctgagacacgccgctgtgctgaacaacaccgtgaccgcccagatcggcatcgtggctgtggtcagaggcagcctgttcttcttcccactgcctctgctgatcaagcggctggctttctgccactctaatgtgctgagccattcttactgcgtgcaccaggacgtgatgaaactggcttacgccgacaccctgcctaacgtggtttatggcctgaccgccattctgctcgtgatgggcgtggacgtgctgtttatctctctgagctacttcctgatcatccggaccgtgctgcaactgccctccaagagtgaaagggccaaggcctttggcacctgtgtgtcccacatcggagtggtgctggccttttacgtgcctctgatcggcctgagcgtggttcacagattcggaaatagcctgcaccccatcgtgcacgtgctcatgggcgacgtgtacctgctgcttccacctgtgattaaccccatcatctacggcgccaaaaccaagcagatcagaacaagagtgctggccatgttcaagatcagctgtgataaggacctccaggccgtcggaggcaagtga

SEQ ID NO: 766 - DNA, 960 bp, Artificial Sequence
  OR51F1 consensus-c
atgctgcagaaccaggacaacatggaaatcctgtccaacctgacctctaagttccccacctttctgctgacaggcatacccggcctggaaagcgctcacgcctggatcagcatccccttctgctgcctgtacgccatcgccctgtctggcaattctatgatcctgttcgtgatcatcacccagcagagcctgcacgagcctatgtactacttcctatctatgctgtctgctacagacctgggactgaccgtgtccacaatgagcacaactctgggcatcctgtggttcgacgccagagagattagcctggactcatgcatcgtgcagatgttcttcctgcacggcttcacatttatggagagcggcgtgctggtggccatggcctttgatagatacgtggccatctgcgaccccctgcggtacaccaccatcctgaccaacagcagaatcatccaaatgggcctgctgatgatcacccggaccgtggtcctgatcgtgccactgctgctgctgctgaagcctctgtccttctgtagaatgaacgccctgagccacagctactgctaccaccctgatgtgatcaagctggcatgcagcgacaccagagccaacagcatctgcggtctgatcgatctgatcctgacaaccggcatcgacaccccttgtatcgtccttagttatatcctgattatcagatccgtgctgcgcatcgccagccctgaggaacggcacaaagtgttcagcacctgtgtgagccacattggcgccgttgccatcttctacatccctatgctgtctctgagcctcgtgcatagatatggaagaagcgcccctaaggtggtgcacagcatgatggctaatgtgtacctgctgctgcctccagtgctgaaccccatcatctacagcgtgaagaccaagcagatccggaaggccatcctgagcctgctcctgacaaaatga

SEQ ID NO: 767 - DNA, 951 bp, Artificial Sequence
  OR51F2 consensus-c
atgagcgtgctgaacaacaccatcgctcagcctctgatcttcctgctgaccggcatccccggcctgaaggccacccagtactggatcagcatccctttttgcctgctgtatgtgatcgccctgtctggcaatagcatgatcctatttgtggtcctgtgtgaaagaagcctgcacgagcctatgtactacttcctgtctatgctgagcgccacagatctgagcctgagtctctgtacactgtctacaaccctgggagtgttctggttcgaggccagagagatcaacctgaacgcctgcatcgcccagatgttcttcctgcacggctttacattcatggaaagcggcgtgctcctggccatggcctttgatagattcgtcgccatctgcgaccccctgagatacaccaccatcctgacaaacgctagaatcgcccaaatcggcatgagcatgctgattagaaacgtggctgtgatgctgcctgtggtgctgttcgtgaaaagactgagcttctgcagctccatggtgctgtctcacagctactgctaccacgtggacctgatccagctgagctgcaccgacaaccggatcaacagcatcctgggcctgttcgccctgttcagcacaaccggattcgactgcccctgtatcctgttgtcctatgtgctgatcatccggagcgtgctgagcatcgccagctccgaggaaaggcggaaagctttcaacacctgcatctcccacatcagcgccgtggccattttctacatcccactgatctccctgtctctggtgcacagatacggccactctgcccctcccttcgttcataccatcatggctaatgtttttctgctgattcctccagtgcttaatcctatcatctacagcgtgaagaccaagcagatccggaaggccatcattaaggtgctgatccagaagcacagcaagagctga

SEQ ID NO: 768 - DNA, 960 bp, Artificial Sequence
  OR51G1 consensus-c
atgaccatcctgtacaacagcagcctgcagaaggccacattcttcctgacaggcttccagggcctggaagatctgcacggctggatcagcatccccttctgcagcatctacctgacagtgatcctgggcaacctgaccatcctgcatgtgatccggaccgacgccaccctgcacgagcctatgtactacttcctggctatgctggccctgacagatctgggactgtgcctgtccaccctgcccaccgtgcttggaatcttctggttcgacgcccgggaaatcggcatccctgcttgttttacccagctgtttttcatccacacactgtctctggtggaaagcagcgtgctgctgagcatgagcatcgacagatacgtggccatctgtaatcctctgagatacagcaccgtcctgacacctgccagaatcgtgaagatgggcctgagctctgtgctccgctccgccctgctgatcctgcctctgccattcctgctcaagcggtttcagtactgcagatctcacgtgctggctcacgcctactgcctgcacctggagatcatgaaactggcttgtagcagcatcatcgtgaaccacatctacggcctgttcgtggtggcctgcaccgtgggagtggacagcctgctgatttttctgagctacgccctgatcctgagaaccgtgctgagcattgccagcagacaggagaggctgcgggccctgaacacctgcgtgtcccacatctgcgccgtgctgctgttctacatccccatgattggcctgtctctggtccacagattcggcgagcacctgcctagaatcgtgcacctgctgatgagctatgtgtacctgctggttccacctctgatgaaccccatcgtgtattctatcaagaccaagcagatccggcaaagaatcatcaagaagttcgagttcatcaaatccctgagatgcttctggtga

SEQ ID NO: 769 - DNA, 936 bp, Artificial Sequence
  OR51G2 consensus-c
atgacactgggctctggcaacagcagcagcagcgcaaccttcctgctgagcggcatccccggcctggaacacatgcacatctggatcagcattcctctgtgttttatgtacctggtgtctatcctgggaaattgcaccatcctctttatcatcaagaccgagcccagcctgcacgagcctatgtacctgttcctgagcatgctggctctgacagatctgggcctgagcctttgtaccctgccaacagtgctcggcatcttctgggtcggagccagagaaatcagccatgatgcttgcttcgcccagctgtttttcatccactgcctgtcattcctggaaagctctgtgctgctgagcatggccttcgacagattcgtggctatctgccaccctctgcactacgccagcatcttgacaaacaccgtgatcggaagaatcggcctggtcagcctgggcagaagcgtggccctgatctttcctctgcctttcatgctgaagcggtttccctactgcggcagccctgtgctgagccattcttattgtctgcaccaggaggtgatgaaactggcctgtgccgacattaaggccaacagcatctacggcatgttcgttatcgtgtccaccgtcggaatcgactccctgctcatcctgttcagctacgctctgatcctgcgcaccgtgctgtccatcgcctctagagccgagagactgaaagccctgaacacctgcgtgtcccacatttgcgccgtgctgctgttctacacccctatgatcggcctgtctgtgatccacagattcggcaagcaggcccctcacctggtgcaggtggtgatgggcttcgtgtacctgctgttcccacctctgatgaaccccatcgtgtacagcgtgaagacaaagcaaatccgggaccgggtgacccacgccttctgctactga

SEQ ID NO: 770 - DNA, 945 bp, Artificial Sequence
  OR51I1 consensus-c
atgctgggcctgaacggtacacctttccagcctgccacactgcagctgacaggaatacccggcatgcagaccggccaggcctgggtggctttaatcttctgcatcctgtatctgatctctatcgtgggaaatctgagcatcctgaccctggtcttttgggagcccgccctgcaccagcccatgtactacttcctgagcatgctgagcctgaacgacctgggcgtgtctctgtctaccctgcctacagtgctggctaccttttgcttcaactaccggcacgttggattcgacgcctgtctggtgcagatgttcttcatccacaccttcagcttcatggaatctggcatcctcctggctatgagctttgatagatttgtggccatctgcgaccccctgcgctacgccaccgtgctgacaaacaacagaatcctggctatgggcctgggcatcctgacaaagtccttcaccaccctgttccctttccccttcctggtgaaaagactgcctttttgtaaaggcaacgtgctgcaccacagctactgcctgcaccctgatctgatgaaggtggcctgcggcgacatccacgtgaacaatatctatggcctgttcgtggttatcttcacctacggcatggacagcaccttcatcctcctgagctacgccctgatcctgagagccgtgcttgctatcgccagccaggagcagcggctgaaggccctgaacacctgtatgagccacatctgcgccgtgctggccttctacgtgccaatcatcgccgtcagcatgatccatagattctggaagtccgcccctcctgtggtgcacgtgatgatgtccaacgtgtacctgtttgtgcctccaatgctgaatcctattatctacagcgtgaagaccaaggaaatccggagaggcattctgaagttcttccacaagagccaagcctga

SEQ ID NO: 771 - DNA, 939 bp, Artificial Sequence
  OR51I2 consensus-c
atgggcctgttcaacgtgacccaccctgcctctttcctgctgaccggaatccccggcctggagtctagccacagctggctggctggccctctgtgcgtgatgtacgccgtggccctgggaggcaacaccgtgatcctgcaggctgtgagagtggaacctagcctgcacgagcctatgtactacttcctgagcatgctgagctttagcgacgtggccatgtccatggccacactgcctaccgtcctgagaaccttctgcctgaatgccaggaacatcgcctttgacgcctgtctgatccagatgttcctgatccactctttcagcatgatggaaagcggcatcctgctggctatgtcctttgatagatatgtggccatttgcgaccctctgagatacgctacagttctgacaaacgaggtgatcgccggcatgggcctggctgtcaccgcccggtccttcatcacactgttccctctgccattcctgatcaagcgcttgcccatctgtagaagcaacgtgctgagccacagctactgcctgcaccccgacatgatgaaactggcatgcgccgatatcaccatcaacagcatctatggactgtttgtgctggttagcacattcggcatggacctgtttttcatcttcctttcttacgtgctgatcctgcggtctgtgatggccattgcttctagagaggagagactaaaggccctgaatacctgcgtgagccatatcctggccgtgctggccttctacgtgcccatgatcggcgtgtccaccgtgcacagattcggcaagcacgcccctagatacatccacgtgctgatgagcaacgtctacctgttcgtgcctccagtgctcaaccccctgatctacagcgccaagaccaaggaaatccggcgggccatcgtgagaatgttccaccggatcaaaatctga

SEQ ID NO: 772 - DNA, 927 bp, Artificial Sequence
  OR51J1 consensus-c
atgaaaaacagcaactctagcctgggatttctgccaaccaccttcatcctggtgggtatccccggcctggaagccgagcacatctggatcagcatccctttctgcctgatgtacatcattatcttcctgggcaacggcacaatcctgcatgtgatccggacagatatcgccctgcaccagcctatgtacctgttcctggccatgctggccctggctgaagtgggcgtctccgccagcacactgcccaccgtgctgggcattttcctcttcggaaatacagagatcagcttcgaggcctgcctgttccccgatgtgctgcaccccttcttcatcgacggcggaagcgcttgtcaggccggccacgtgttcgtggccatctgcagccacctgcaacctacagccctgtacaccgccccacggatctggcacagatctgctcactacgcccacggcagcatcgccctgatggcccctctgcctgccctgctgtggcctttctgccctcacaacttcctgctgctccatcctaacctgatccacctgccatgtggcgacatctctatcaacaacatctacggactgtttatcgtgacctccacctttggcctggacagcctgctgatcgttgtgtcctacggcctgatcctgcacaccgtgctgggcatcgccaccggcgagggcagaaagaaggccctgaacacctgcggcagccacgtgtgcgccgtgctggcttattacgtgcctatgattggcctgagcatggtgcacagattcggacaccacgtcagccccctgctgcaggccatgatggctaatgcctacctgtttttccctcctgtggtgaaccccatcgtgtacagcatcaagaccaaggaaatcagacgcggcatcgttagaatgctttctgagaagcggagaagagtgtga

SEQ ID NO: 773 - DNA, 948 bp, Artificial Sequence
  OR51L1 consensus-c
atggtcgtgtggaacaactccgacgccatggaacctatctttatcctgcgcggcttccccggcctggagtacgtgcacagctggctgagcattcccttctgcctggcctacctggtggccttcatcggcaatgtgacaatcctgagcgtgatctggatcgagagcagcctgcaccagcctatgtactacttcctgtctatcctggcactgacagatctgggcatgagcctgagcaccctgccaacaatgctggccgtgctgtggctggatgccagagagatccaggccagcgcctgctacgcccagctgttcttcatccacaccttcacctttctggaaagctctgtgctgctggccatggccttcgacagatttgtggccatctgtagacctctgcattatcctacaatcctgaccaactctgtgatcggcaaaatcggcctggcttgtctgctgaggtccatgggcgttgtgctgcctacccctctgctgctgcggagataccactactgccacggcaacgctctgagccacgccttttgcctccaccaagacgtgctgaagctgagctgcagcgacgccagaatcaacagcatctatggcctgtgcgtggttattgccaccctgggagtggacagcgtgttcatcctgctgagctacgtgctgatcctgaacgctgtgctgggcatcgcctctagagaggaaagactgaaggccctgaacacctgtgtgtcccacatctgcgtggtgcttatcttcttcgtgcctgtgatcggagtgtccatggtccatagattcggcaagcacctgtctccaattgtccacatcctgatggctgatatctacctgctccttccccccgtgctgaatcctatcgtgtacagcgtgcggaccaagcagatccggctgggcatcctgagaaagttcggactgagacggcggttctga

SEQ ID NO: 774 - DNA, 993 bp, Artificial Sequence
  OR51M1 consensus-c
atgagcgcccaatacagcctgagccctcagttcatgctgctgtccaacatcacacagttttctcctatgttctacctgaccggcttcccaggtctggaggccattgagcactggatcttcatccctttcttcctgatgtacctggtggccatcagcggcaactgcttcatcctgatcatcatcaaaacaaaccctagactgcacacacctatgtactacctgctgtccctgctcgccctgaccgatctgggcctgagcgtgtccaccctgcctaccacaatgggcatcttttggttcaatagccattctatctacttcggcgcctgtcagatccagatgttttgcatccacagctttagcttcatggaaagcagcgtgctgctggtcatgtctttcgacagattcgtggccatctgccaccctctgagatattccgtgatcattaccggccaaagagtggtgcgggccggcctgattgtgatccttcgcggccccgtggccctgatccccatcgtgctgctgctgaaggccttcccctactgcggcagtgtggtgctgtctcacagcttctgcctgcaccaggaggtgatccacctggcttgtaccgacaccaccttcaacaacctgtacggcctgatgctggtggttttcacagtgatgctggacctggtcctgatcgccctgtcttatggactgatcctgcacaccgtggctggccttgcctctcaggaggaacagctgcgggcttttcagacctgtacaagccatctgtgcgccgtgctggtgttcttcgtgcccatgatgggcctgagcctggtgcacagattcggaaagcacgcccctcctgctgttcacctgctgatggccaatgtgtacctgttcgtgccacctatgctgaaccccatcatctacagcatcaagaccaaggaaatccggagagccatcatcaaactgctgggactcagaaaggccagcaaggagagctggggctga

SEQ ID NO: 775 - DNA, 948 bp, Artificial Sequence
  OR51Q1 consensus-c
atgtctcaagtgaccaataccacccaggagccattctacttcatcctgacaggcatccccggctttgaagcctcccacatctggatcagcatccctttctgctgtttgtacaccatcagcatcatgggcaacaccacaatcctgacagtgatccgcaccgagcctagcctgcatcagcctatgtacctgttcctgagcatgctggccctgactgatctgggcctgaccctgaccaccctgcccaccgtgatgcagctgctctggttcaacgtgcggagaatctcttttgaggcctgcttcgcccagttcttcttcctgcacggcttcagctttatggaaagcagcgtgctgctggccatgagcttcgacagatacgtggccatctgtagaccactgcactacgcctccatcctgaccaacgaggtgattggaagaatcggcctggccatcatctgcaggtgcgtgctggctgttctgccttctctgttcctgctcaagcggctgcctttttgccacagccatctgctgagccacagctattgtctgcaccaggatatgatcagactggtctgcgccgacatcagagtgaacagctggtacggcttcgccctggtgctccttattatcgtggtggaccccctgctgatcgtgctgtcttatacactgatcctgaagagcatcctcggcaccgcctcttgggccgaaagactgagagccctgaacaactgcctgagccacatcctggctgtgctggtgctgtacgtccccatggttggagtgtccatgacacacagattcgcaaagcacgccagccctctggtgcacgtgatcatggctaacatctacctgctggctcctcctgtgatgaaccctatcatctacagcgtgaaaaccaagcagatccggcagggcattctgaatctgctgtcccagcggaacatgcactga

SEQ ID NO: 776 - DNA, 972 bp, Artificial Sequence
  OR51S1 consensus-c
atgagcaccctgcccacacagatcgcccctaacagcagcacaagcatggcccctacattcctgctggttggcatgccaggcctgtctgcagtgcccagctggtggaccctgcctctgatcacagtgtacctgctgtccgccctgggcaacggcaccatcctgtggatcatcgccctggaacccaccctgcaccgccctatgtacttcttcctgtttctgctgagcgtgtccgatgtgggcctcgccaccgccctgatgcctaccctgctgggactggccctggccggagcccacgccgtgcctgctagcgcttgtctgctgcaaatgttctttgtgcacgtgttcagcgtcatggaatccagcgtgctgctggctatggccattgaccgggccctggccatctgcagacctctgcactaccctgctctgctgaccaatggcgtgatcagcaagatcggactggccatcgccttccggtgcctgggcctgcacctgcccctgcctttcctgctggctcacatgccttactgcctgccacaggtgcttacacacagctattgcctgcatcctgatgtggccagactggcctgtcctggcgcctggggcgccgtgtacagcctgtttgtggtgctgagcgccatgggcctggaccccctgctgatcttcttcagctacggcctgatcggcagagtgcttcagggcctcggatctagagaggacagatggaaggccggccagacctgcgccgctcacctgtctgccgtgttgctgttctacatccccatgatcctgctggctctcatcgacaggctgagactgcctatccctcagcccgcccacaccctgctgagttacgtgcatttcctgctgccacctctgatcaaccccatcctgtactctgtcaagatgaaagagatccgggagagaatcctgaagcggctgcagcctagaaaggtgggctgcgcccagtga

SEQ ID NO: 777 - DNA, 981 bp, Artificial Sequence
  OR51T1 consensus-c
atggctatcttcaacaacaccacaagcagcagcagcaacctgttgaccgccttccctggcctggaactcgctcatgtgtggatttccatccccgtgtgttgcctgtacaccatcgccctgctgggcaacagcatgatcctgtttgtgatcatcaccgagcgcagcctgcacaagcctatgtactacttcctgagcatgctgtccgccgtggacctgtgcctgaccatcacaacactgcccaccgtgctcggagtgctgtggttccacgccagagagatcagcttcaaggcctgtctgatccagatgttcttcgtgcacgccttctcttttctggaaagctctgtgctggtcgccatggctttcgatagattcatggccatctgcaacccactgaagtacgccacagtgctgacagatatgatgatcctggtgatcggcctggtgatctgcattaggcaggtgatctttctgttccccctgttactggctctgaaaaccgtgtcctttcacggcggccaggagctgagccacccattctgctaccaccccgacgtgattaagtacacatacagcaacccttggatcagctccttctggggcatgttcctgcaactgtatctgaacggcaccgacctgctgttcatcctttttagctacgtgctgatcctgcggaccgtcctgagcatcgttgcccctaagaagcagcagaaggccctgtctacctgcgtgtgccacatctgcgccgtgaccgtgttctacgtgcccatgatcagcctgtctctggcccacagactgttcagcagcacccctagagtgctgtgtagcatcctggccaacatctacctgctgctgcctcctgtgcttaatcctatcatctatagcctgaaaaccaagacaatccggcaggccatgctgcagctgctgcagtctaagggctcttggggacctaatgtccggggactgagaggcagatgggactga

SEQ ID NO: 778 - DNA, 945 bp, Artificial Sequence
  OR51V1 consensus-c
atgagcgccctgagcagctccatgatcaccagctcttctttcctgctgacaggcttccccggcctggaacagcaatacccttggctgtccatacccttcagcagcatctatgctatggtgctgctgggaaactgcatggtcctgcatgtgatccggacagagcctagcctgcaccagcctatgttctacttcctggctatgctggccctgacagatctgtgcatgggcctgagcaccgtgcacaccgtgctgggcatcctgtggggccttatccaggagatcagcctggacagctgcatcgcccagagctactttatccacggcctgagcttcatggagagctctgtgctgctcgccatggccttcgacagatacatcgctatctgtaatcctctgcggtatagctctatcctgacaaactctagaatcattaaaatcggcgtgaccatcctgggaagaagcttcctgttcatcacacctccaatcatcagactgaagttcttcaactactgccgcccccacatcctgagccacagcttctgcctgcaccaggacctgctcagactggcatgcagcgatatcaggtttaacagctactacgccctggccctggtgatctgcaccctgctgctcgacgccgtgctgatcctgttttcctacatccttatcctgaagtctgtgctggccatcgccagccaagaggaaagacacaagtccctgcagacctgtgtgtcccacatctgtgccgtgctggtcttctacatccctatcattggcctgaccatggttcatagattcggaaagcacctgtctcctgtggtgcacgtgctgatgggcaacatctacatcctgtttccacctctgatgaaccccatcatctacagcgtgaagacccagcagatccggaccagaatgcagcggctgttcagcctgaaaagatactga

SEQ ID NO: 779 - DNA, 939 bp, Artificial Sequence
  OR52A1 consensus-c
atgagcatctctaatatcaccgtgttcatgcctagcgtgctgacactgatcggcatccccggcctggaatccgtgcagtgctggatcggcatccccttctgcgccatgtacctgatcgccatgatcggcaacagcctgctgcttattatcatcaaaagcgagagatccctgcacgagcctatgtacatcttcctgggcatgctgggagtgaccgacatcgccctggcaacatctatcgtgccaaagatgctgggcatcttctggttccacgtgcccgagatctacttcgacagctgcctgctccagatgtggctgatccacaccttccaatgtatcgagtccggcattctcctggccatggccctggacagatacgtggccatctgctaccccctgagacacgccgccatcttcacacatcagctggtcacacagatcggcgccgtggtcaccctgcgggccgctatcctggttgccccttgcctggtgctgatcaagtgcagattccagttctaccacacaaccgtgatcagccacagctactgcgagcacatggccatcgtgaagctggccgctgaaaacgtgcgggtgaacaagatctatggactgttcgtggcttttaccgtggccggcttcgatctgacctttatcacactgagctatatccagatcttcatcaccgttttcaggcttcctcagaaggaagccagactgaaggcctttaacacctgcattgcccacatctgtgtgttcctgcaattttacctgctggctttcttcagcttcttcacccacagatttggatctcacatccctccatacatccatattctgttcagcagcatctacctgctggtgcctcctttcctgaaccctctggtgtacggcgctaaaaccaagcagatccggatccacgtggtgaagatgttctgtagctga

SEQ ID NO: 780 - DNA, 951 bp, Artificial Sequence
  OR52A5 consensus-c
atgctgaccttcaatggcagcgtcttcatgccttccgtgctgaccctgatcggaatccccggcctggaatctgtgcagtgctggatcggcatccctttttgcgccatgtacctgatcgccgtgatcggcaactccctgatcctggtgatcatcaagtacgagaacagcctgcatatccctatgtacatcttcctggccatgctgggagctacagacatcgctctgagcacctgtatcctgcccaagatgctgggcatcttctggttccacctgcctgagatcagcttcgacgcctgcctgctgcagatgtggctgatccactctttccaggccatcgagagcggcatcctgctggctatggcccttgatagatacgtggccatttgtatcccactgcggcacgccacaatatttagccagcagctgctcacccacatcggcgtgggcgtgaccctgagagccgctatcctgatcgccccttgtctgggcctgattaagtgcaggctgaagcactaccggaccaccgtggtgtcccacagctactgcgaacacatggccatagttaagctggccacagaagatatcagaatcaacaagatctacggcctgttcgtggccttcgccatcctcggatttgacatcatcttcatcacactgagctatgtgcagatcttcatcaccgtgttccaactgcctcagaaagaggccagattcaaggcctttaacacttgcatcgcccacatctgcgtgttcctgcaattttacctgctggcattcttcagctttttcacccatagattcggcagccacattccaccttatgtgcacatcctgctatctaatctgtacctgttagtcccccccttcctgaaccctatcgtgtacggcgtgaaaaccaagcagatccgggaccacgtgctgaaagtgttcttcagcaagaaggtgacatga

SEQ ID NO: 781 - DNA, 969 bp, Artificial Sequence
  OR52B2 consensus-c
atgagccacaccaacgtgacaattttccaccccgccgtgttcgtgctgctgggcatccctggactggaagcctaccacatctggctgtctatcccactctgcctgatgtatatcaccgccgtgttgggcaacagcatcctgatcgtggtcatcatcacagagagaaatctgcacgagcctatgtacttcttcctgtccatgctcgctgtgactgatatcctgctgtctacaaccaccgtgcctaaggccctggccatcttctggctgcatgcccacaacatcgccttcgacgcctgtgtgacccaggtgttctttgtgcacatgatgtttgttggagagagcgccattctgctggctatggcctttgacagattcgtggccatctgcgcccctctgagatacaccaccgtcctgacctggcctgtggtgggcagaatcgctctggctatcgtcacaagaagcttctgcatcatctttcctgtgatcttcctgcttaaaagactgcccttctgtagaacaaacatcgtgccccacagctactgcgagcacatcggagtggcccgcctggcttgtgccgatattacagtgaacatctggtacggcttctccgtgcctatcgtgatggtgatcctggacgtgatcctgatcgccgtgtcctacagcctgatcctgcgggccgtgtttagactgcctagccaggacgccaggcacaaggccctgagcacctgcggcagccacctgtgcgtgatcctgatgttctacgtgccatctttcttcaccctgctgacacaccggttcggccggaatatccctcaacacgtgcacatcctgctggccaacctgtacgtggtcgtgccccccatgctgaaccccattgtgtacggcgtgaagaccaagcagatccgggaaggcgttgctcatagattcttcgacatcaagacctggtgctgcaccagccctctgggctga

SEQ ID NO: 782 - DNA, 945 bp, Artificial Sequence
  OR52B4 consensus-c
atgaccacactgaatcacacaggcgtgtcccacaccgtgttccacctgctgggtatccccggactggaggaccagcacatgtggatcagcatccccttcttcatcagctatgttatcgctctgctgggcaacagcctgctgatcttcatcatcctgaccaagagaagcctgcacgagcctatgtacctgttcctctgcatgctggctggcgctgatatcgtgctttctacctgcaccgtgccccaggccctggctatcttctggttccacgccggcgaaatctccctggaccggtgcattacccagctgttcttcatccacagcacattcatcagcgagagcggcatcctgctggtgatggccttcgacagatatatcgccatctgctaccctctgagatacaccaccatcctgaccaacgccctgatcggcaagatcggagtcacaatctttctgagaagctacggcaccatcttccccatcatcttcctgctgaagcggctgacattttgtcagaacaacatcatccctcacaccttctgcgagcacatcggcctggccaagtacgcctgcaacgacatcagagtgaacatctggtacggctttttcgtgctgatgtctacagtggtgctggatgtggtcctgatcttcgtgtcttacgtgctgattctgcacgccgtgttccacatgcctagccaggacgccaggcacaaggccctgaacacctgtggcagccacgtgtgtgtgatcattctgttttacggacctggcatattcaccacactgacacagagattcggcagacatatccctcctcatattcacatcctgctggccaacgtgtgcatcctggccccaccaatgctgaatcctatcatctacggcatcaaaaccaagcagatccgggaacaggtggtgcacttcctgtttatcaagcaaaaatga

SEQ ID NO: 783 - DNA, 1011 bp, Artificial Sequence
  OR52B6 consensus-c
atggcccaggtgcgggccctgcataagatcatggctctttttagcgccaactctatcgccgccgtcaacaacagcgacacaaggatcgccggatgtctgctgacaggcatccctggactggaacacctgcatatctggctgtccatccccttctgcaccatgtacatcgccgctctggctggcaacggcatcctgatctgcgtgatcctgtctcagccttccctgcacgagcctatgtacatcttcctgtctatgctggccagcgcagatgtgctgctgtccaccagcaccatgcctaaggccttggctaatttctggctgggcagcagccacattagcttcgacggctgtctgacccagatgttcttcatccacttcctgtttgtggccgattctgctgtgctgctcgctatggccttcgatagatacgtcgccatctgcagccctctgcggtatgccacaatcctgacatctaaagtgataggaaagatcgtggccgctacactgaccagatcttttatcatcatgttccctagcatcttcctgctgaagcggctgcactactgcagaatcaacatcattgcccacaccttctgcgagcacatgggcatcgccagactgagctgcagcgacatcagcatcaacgtgtggtacggcctggccgccgccctgctgagcaccggcctggacatcatcctgatcaccgtgtcctacatccacatcctgagagccgtgttcagactgccttctcaggacgcccggagcaaggccctgagcacctgtggctcccacgtgtgcgtgatcctgctgttctacatccccgccctgttcagcgtgttcgcctacagattcggcggaagaagcatccccagatatgtgcacatcctcctggccaatctgtacgttgtgattccacctatgctgaaccccatcatctacggcgtgcggaccaagcagatcctggaaggcgccaagcaaatgtttagcaacctggctaaagagagcaagtga

SEQ ID NO: 784 - DNA, 957 bp, Artificial Sequence
  OR52D1 consensus-c
atgagcgccagcaacctgtccgacaaccacctccctgacaccctgttcctgaccggcattcctggcctggaggccgcccacttctggatcgctatccctttttgcgccatgtatctggtcgccctggccggcaacgccgctctgatcctggtcatcgctacagacaacgccctgcacgcccctatgtacctgttcctgtgcctgctgtccctgacagacctggccctgtctagcacaaccgtgcctaaaatgctggccatcctgtggctgcatgctggcgaaatctcttttggcggatgtctggctcagatgttctgcgtgcattctatctacgcccttgagagcagcgtgctgctggccatggcctttgatagatacgtggccatctgcaaccccctgcgctacaccaccatcctgaatcacacagtgatcggcagaatcggactggtgggcatcttccggagcgtggccatcgtgtcccctttcatcttcctgctgcggagactgccttattgtggacaccacgtgatggcccatacatactgcgagcacatgggaattgccagactggcttgtgccaacatcaccgtgaacatcgtgtacggcctgacagtagctctgctggccatgggccttgatagcatcctgatcgcaattagctacggcttcatcctgcacgccgtgttcagactgcccagccacgacgcccagcacaaggccctgtctacctgcggcagccacctgggcgtgatcctggtgttctacatccccgccttcttcagcttcctgacccacagattcggccaccaccgggtgcccaagcacgtgcacatctttctggccaatctgtacgtgctggttccacctgtgctgaacccaatcatctacggcgcccggaccaaggaaatcagaagcagactgctgaggctgctgcacctgggcaagaccagcatctga

SEQ ID NO: 785 - DNA, 942 bp, Artificial Sequence
  OR52E5 consensus-c
atgctgcacacaaacaacacccagttccatcctagcagcttcctgctggtcggcatccccggcctggaagatgtgcacatctggatcggcttccccttcttcgccgtgtacctgattgccctgctgggaaatatcaccatcctgttcgtgatccaaacagagcggagcctgcaccagcctatgttctatttcctggctatgctggcctgcactgatctgggcctgtctacagccacaatccctaagatgctgggcatcttctggttcaacctgcgcgaaatcgtgtttggcgcctgcatcacacagatgtacaccatccacatctgtaccggcctggagagcgtggtcctgacagtgatggccattgacagatacatcgctatctgcaacccactgagatactccatgatcctgaccaacaaggtgatagccatcctgggcatcgtgatcatcgtgcggaccctggtgttcgtgacccctttcatctttctgatcctgaggctgcctttctgcggcgtgcggatcatcccccacacctactgcgagcacatgggactggcaaagctggcctgtgccagcatccgggtgaacgtgatctatggcctcatcgcttttagcgtgggctacatcgacctgagcgttattggattttcctacgtccagatccttagagccgtgttccacctgcccagctgggacgccagactgaaggccctgagcacctgtggatctcacgtgtgcgtgatgctggccttctacctgcctgccctgttttctttcatgacccacagattcggccacaacatccctcattacatccacatcctcctggccaacctgtacgtggtggttcctccagctctgaatcctgtgatctacggcgtgagaaccaagcagatcagagagagagtgctgagaatgctgaaccccaaaagcttctga

SEQ ID NO: 786 - DNA, 936 bp, Artificial Sequence
  OR52E6 consensus-d
atgagcatcgccaatgatacacagttccaccctagcagctttctgctgctgggaatcccaggcctggaagatgtgcacatctggatcggcttccccttcttctttgtgtacctagtcgccctgctgggcaacgccgctgtgctgttcgtgatccagaccgagcacagcctgcacgagcctatgtactacttcctggccatgctggacagcatcgacctgggcctgagcaccgccacaatccctaagatgctgggcatcttctggttcaacctgagagagatctcttttggaggatgtctgtctcagatgttcttcatccatttcttcaccgccatggaatctatagttctggtggccatggccttcgacagatacatcgccatctgcaagcctctgcggtacaccatgatcctgaccagcaagatcatttctctgatcgctggcatcgccatcctgaggtccctgtatatggtgatccctctggtgtttctgctgctgcgcctgcctttctgcggccaccacatcatcccccacacctactgcgagcatatgggcatcgctagactggcctgcgccagcatcaaagtgaacatcatgttcggcctgggaaatatcagcctgcttctgctggacgtgctgctgatcatcctgtcctacgtgcggatcctgtacgccgtgttctgcctgcctagctgggaggccagactgaaggccctgaacacctgtggcagccacatcggcgtgattctggctttttttacccctgccttcttcagcttcctgacacacagattcggccacaacatcccccagtacatccacattttcctcgccaacctgtatgtggtcgtgccacctgctctgaaccccgtgatctacggcgtgcggacaaagcaaatccgggaaagagtgctgagaatcaaaaccgaccactga

SEQ ID NO: 787 - DNA, 948 bp, Artificial Sequence
  OR52H1 consensus-c
atgatcatcttcaacctgtctagctacaatcctggacctttcatcctggttggcatccctggcctggaacagttccacgtgtggatcggcatcccattctgcatcatctatatcgtggccgtggtgggtaactgcatcctgctgtacctgatcgccgtcgagcggagcctgcacgagcctatgtttttcttcctgtccatgctggcaatgaccgatctgatcctgtccaccgccggcgtgcctaagaccctgagcatcttttggctgggcgctagagagatcaccttccccggctgcctgacccagatgttctttctgcactacagcttcgtgctggacagcgccatcctgatggccatggcttttgacagatacgtggccatctgcagccctctgcggtacacaacaatcctcacacctaagaccatcatcaagatcgctgtgggaatctcttttagaagcttctgcattatccttccagatgtgttcctgctgacacggctgcccttctgtaggaccagaatcatcccccacacgtactgtgaacacatcggcgtggctagactggcctgcgccgacatcagcatcaacatctggtacggcttctgcgtgcctatcatgacagtgatcagcgacgtgatactcattgccgtgtcctacaccctgatcctttgtgccgtgttccggctgcctagccgggacgccagacaaaaagccctgggaacctgtggcagccacgtgtgcgtgatcctgatgttctacacccctgccttcttctctatcctggcccacagatttggccataatgtgtctcgcaccttccacatcatgttcgccaacctgtatatcgtgatcccccccgccctgaaccccattgtctacggcgtcaagaccaaacagatcagagataaggtgatcctgctgttcagcaccaagggcacaggctga

SEQ ID NO: 788 - DNA, 975 bp, Artificial Sequence
  OR52I1 consensus-c
atgctgggacctccatacaaccacacaatggagacaccagccacattcctgctcgtgggcatccccggcctgcagagcagccacctgtggctggccatcagcctgagcgccatgtacaccacagccctgctgggcaacaccctgattgtgacagtgatctggatggacagcaccctgcacgagcctatgtactgcttcctgtgcgtgctcgccgcagtggacatcgtgatggccagcagcgtggtgcccaagatggtgtccattttctgtagcggcgacagcagcatctccttcaacgcctgttttacccaaatgtacttcgtgcacgccgccaccgccgtggaaaccggcctgctgttagccatggcctttgacagatacgttgctatttgcaagcccctgcactacaaaaggatcctgacccctcaggtgatgctgggaatgagcgtgaccatcaccatccgggccgtgacatttatgacccctctgagctggatggtcagccatctgcccttctgcggcagcaatgtcgtgctgcattcttattgtgaacacatggctgtggccaagctggcttgcgccgaccccatgcctagctctctgtacagcctgatcggcagctccatcatcgtgggatctgatgtggctttcatcgccgcttcttacatcctgatcctgagagccgtgttcgatctgtcttcaaagaacgcccagctgaaagccctgagtacatgcggcagccacgtgggtgtcatggccctgtattacctgcctggcatggcctccatctacgtggcttggctgggccaggacatcgttcctctgcacacccaggtgctgctggccgatctgtacctgatcatccctcctaccctgaaccctatcatctacggcctgcggaccaagcagatcagagagagaatctggagcctgctgatgcacttcctgttcgaccacagcaatctgggctcttga

SEQ ID NO: 789 - DNA, 975 bp, Artificial Sequence
  OR52I2 consensus-c
atgctgggccccgcctacaaccacaccatggagacacctgccacattcttcctggtgggcatccctggactgcagagcagccacctgtggctggctatcagcctgagcgccatgtatacaatcgccctgctcggaaataccctgatcgtgaccgtcatctggatggacagcaccctgcaggagcctatgtactgtttcctgtgcgtgctggccgccgtggacatcgtcatggccagctccgtggtgccaaagatggtgtctatcttttgctccggcgactccagcatctcttttaacgcctgcttcacccagatgtacttcgtgcacgccgctaccgccgtggaaacaggcctgctcctggctatggcctttgataggtacgttgctatctgcaagcctctgcattacaagagaatcctgacaccacaggtgatgctggggatgagcgtgaccatcacaattagagccgttatcttcatgacccctctgagctggatggtcagccacctgcccttctgcggctctaacgtggtgctgcacagctactgcgagcacatcgccgtggccaaactggcttgtgccgaccccatgcctagcagcctttacagcctgatcggcagctccattatcgtgggcagcgatgtggcattcatcgccgcctcttacatcctgatcctgagagccgtgttcggcctgtcttctaaaaatgcccaactgaaggccctgtccacctgtggctctcacgtgggcgtgatggccctgtactatctgcctggcatggctagcatctacgtggcctggctgggacaggacgtggtgcccctgcacacccaggtgctgctggccgatctctacctgatcatccctcctacgctgaaccccatcatctacggcctgcggaccaagcagatccgggaaagaatctggagcctgctgatgcactgcctgttcgaccacagcaacctgggcagctga

SEQ ID NO: 790 - DNA, 936 bp, Artificial Sequence
  OR52J3 consensus-c
atgttctaccacaaccggagcatcttccaccccgccaccttttttctgattggaatccccggcctggaagatttccacgcctggatcagcctgcctttttgcagcgtttacctggtggctctgctgggaaatgccacaatcctgctggtcatcaaggtggaacaaacactgagagagcctatgttctacttcctggctatcctgagcaccatcgacctggccctgtctacaaccagcgttcctagaatgctgggcatcttctggttcgacgctcacgagatcaacttcggtgcttgtgtggcccagatgttcctgatccatgccttcaccggcatggaagccgaggtgctgctggccatggcctttgatagatacgtggcaatctgcgcccctctgcactacaccacaatcctgacctctagagtgctggtcggcatttccatgtgcatcgtgatcagacctgtgctcctgaccctgcctatgatctacctgatctatagactgccattctgccaggcccacatcatcgctcattcttactgcgagcacatgggcatcgccaagctgtcttgtggcaacatccggatcaacgccatctacggcctgttcgtggtgtccttcttcgtgctgaacctggtcctcatcggaattagctacgtgtacatcctgagggccgtgttccgccttccaagccaggacgccagactgaaggccctgagcacatgcggcagccacgtgggcgtgatctgtgtgttctacatccctagcgtgttcagcttcctgacccacagattcggccacaacatccctcggtacatccacatcctggtggccaacctgtatctggtgatccccccctccctgaatcctatcatttacggcgtgcggaccaagcagatcagagagcgggtgctgtacgtgtttaccaagaaatga

SEQ ID NO: 791 - DNA, 945 bp, Artificial Sequence
  OR52K1 consensus-c
atgagcgccagcaacatcaccagcacacatcccgccgttttcctgctggtgggcatccctggcctggaacacctgcacgcctggatctctatccccttctgcttcgcctacacactggccctgctgggcaattgcaccctgctgtttatcatccaggccgacgccgccctgcacgagcctatgtacctgtttcttgctatgctggccacgatcgatctggtcctgtccagcacaaccctgcctaagatgctggccatcttttggttcagagatagagagatcaatttctatgcctgcctggtgcagatgttcttcctgcacagcttcagcatcatggagagcgctgtgctcctggccatggctttcgaccggtacgtggcaatctgtaaacctctgcattacaccacagtgctgaccggccccctgatcacaaagatcggaatggccgccgtggctagagccgtgaccctgatgacccctctgccattcctgctcagaagattccactactgcagaggacctgtgattgcccactgctactgtgaacacatggccgtggtgcggctggcatgcggcgacaccagatttaacaacatctacggcattgccgtggccatgttcatcgtggtgctggacctgctgttcgtgatcctgagctacatcttcatcctccgcgccgtgctgcagctggcttctcaagaggccagatataaggccttcggcacctgtgtgtcccacatcggcgccatcctgagcacatacacccctgttgtcatttctagcgtgatgcacagagtcgccaggcgggccgctcctcacgtgcacatcctgctggccatcttttacctgttgttccctccaatggtgaaccccatcatctacggcgtgaagaccaaacagatccgggactacgtgctgtctctgttccagcggaagaacgtgtga

SEQ ID NO: 792 - DNA, 945 bp, Artificial Sequence
  OR52K2 consensus-c
atgagcgcctctaatatcaccagcacccatcctgccgcttttctgctcatgggcatccccggcctggaacacctgcatatctggatcagcatcccattctgcagcgcctacaccctggcacttctgggcaactgcaccctactgttcatcattcaagctgatgccgccctgcacgagcctatgtacctgttcctggccatgctggctgctatcgacctggtgctgtctagcagcacactgcctaagatgctggccatcttctggttcagagatagagagatcaacttcttcgcctgtctggtgcagatgttcttcctgcacagcttcagtatcatggaaagcgccgtgctgctggctatggccttcgacagatacgttgccatctgcaagcccctgcactacaccacagtgctgaccggcagcctgatcaccaaaatcggaatggccgccgtggccagagccgttacactgatgacccctctgcccttcctgctgcggtgcttccactattgccggggtcctgtgatcgcccactgctactgtgaacacatggccgtggtcagactggcctgcggcgacaccaggttcaacaacatctacggcatcgccgtggctatgttcatcgtggtgctggacctgctgtttgtgatcctgtcctacatctttatcctgcaggccgtcctccagctggccagccaggaggcccggtataaagccttcggaacatgtgtgtcccacatcggcgccatcctggccttctacacacctgtggtgatctctagcgtgatgcacagagtggcccggcacgccgcccctcacgtgcacatcctgctggctaatttctacctgctttttcctccaatggtgaaccccattatctacggcgtgaagaccaagcagatccgcgagagagtgctgggcgtctttctgagaaaggacgtgtga

SEQ ID NO: 793 - DNA, 966 bp, Artificial Sequence
  OR52N1 consensus-c
atgagctttctgaacggcaccagcctgacccctgccagcttcatcctgaatggcatccccggcctggaggaggtgcacctgtggatctcttttcctctgtgcaccatgtacagcatcgccatcaccggcaacttcggcctgatgtacctgatctacagtgaagaggccctgcaccggcctatgtatatcttcctggctctgctgagcttcaccgacgtgctgatgtgcacaagcaccctgcctaacaccctgtgcatcctgtggttcaacctgaaagagatcgacttcaaggcatgcctggcccagatgttcttcgtgcacacctttacaggaatggaatccggcgtcctgatgctgatggctctcgatagatacgtggccatttgttaccccctgcggtacgccaccatcctgacaaattctgtgatcgccaaggccggactgctgaccttcctccgcggcgtgatgctggtgatccccttcacattcctgaccaaaagactgccttactgcagaggcaatgtgattcctcatacatattgcgaccacatgagcgtggctaagatcagctgcggcaacgtgcgggtgaacgccatctacggcctgatggtggccctgctgatcggcggattcgacatcctgtgtatcacaataagctacaccatgatcctgagagccgtggtgtccctgtcttctgccgatgccagacagaaggccttcagcacctgtaccgcccacatctgcgccatcgtgatcacctacgtgccagcttttttcactttctttacacacagattcggcggccacacaatccctccacacatccacatcatcatggccaacctgtacctgctgatgcctcccaccatgaaccctatcgtctacggagttaagaccaagcagatccgggaaagcgtgatcagattcctgctgaagggcaaggacaacagctcccacaacatctga

SEQ ID NO: 794 - DNA, 945 bp, Artificial Sequence
  OR52R1 consensus-c
atgctggctagcggcaatagcagctctcatcctgtgtccttcatcctgctgggcatccctggtctggagaacttccagttctggatcgccttccctttctgtgccatgtacgccgttgccgtggtgggcaacatcacactgctgcacatcatccggaccgaccacaccctgcacgagccaatgtacctgtttctggccatgctggctattaccgacctggtcctgagcagcagcacacagcctaagatgctggccatcctgtggttccacgcccacgaaatcgagtaccacgcctgcctgatccaagtgttcttcatccatgccttcagctctgtggaatccggagtgctgatggccatggctctggatagatacgtggccatctgtttcccactgagacactcgtctatcctgacacccagcgtggtgatcaagctgggcgccgctgtgatgctgagaggccttctgtgggtgtctcctttctgcttcatggttagcagaatgcctttctgcccaaaccaggtgattccccagagctactgcgagcacatggccgtgctgaagctggtgtgcgccgacaccagagtgaacagaggctatggcctgtttgtggccttttccgtggtgggattcgacatcatcgtgatcagcatgagctacgtgatgatcctgcgggccgtgctgcagctgcctagcggcgaagccagactgaaggcctttggcacctgcgccagccacatctgcgtgatcctggctttctacatccccgccctctttaccttcctgacccacaggttcggacaccacgtgcccagagtggtccacatcatgttcgcaaacctgtacctgctggtacctcctatgctgaaccccatcatctacggcgtgcggacaaaacagattcgggaccgcgtgatccagggctgctgtggcaaggatccttga

SEQ ID NO: 795 - DNA, 963 bp, Artificial Sequence
  OR52W1 consensus-c
atggccgagacacctcagctgaacagcacatttctgagacccacattcttcatcctgaccggcatccccggactgggcagcgcccaggcctggctgacactggtctttggccctatgtacctgctcgccctgctgggaaacggcgccctgctcgccgtggtgtggatcgacagcaccctgcaccaacctatgttcctgcttctggcaaccctggccgccaccgacctgggcttggctaccagcatcgcccctggcctgctggccgtgctgtggctgggacctagacctgtgccctacgccgcttgtctggtccagatgttcttcgtgcacgccctgaccgccgtcgagagcggcgtgctgctggccatggcctgcgacagggccgttgctgtgggcagacctctgcactaccccgtgctggtgaccaaggcccgggtgggttatgccgccctggccctggccctgaaggccgtggccattgtggtgccattccccctgttagtggctagattcgagcacttccaggccaaaaccatcggccacgcctactgcgcccatatggccgtggtggaactggtggtgggcaatacccgggccaacaatctgtacggcctggctctgagcctggctgtgtccggcatggatatcctgggcatcacaggctcttatggcctgatcgcccacgccgtgctgcggctgcctaccagagaggctagagccaaggcgtttggaacatgcagctctcacatctgcgtgatcctggccttctacgtgccaggactgttcagctacctgacccaccggttcggccggcacaccgtgcctaagcctgttcacatcctgctcagcaacatctacctgctgcttcctccagctctgaaccccctgatctacggcgctcgcaccaagcagatcagagatagactgctggaaacattcaccttcagaaaatcccagttttga

SEQ ID NO: 796 - DNA, 942 bp, Artificial Sequence
  OR56A5 consensus-c
atgaccctgcctagcaacaacagcaccagccctgtgttcgagttctttctgatctgcttccctagcttccagtcttggcagcactggctgagcctccccctgtccttactgttcctgctggctatgggcgccaacgccacactgctgattacaatctacctggaagccagcctgcaccagcctctgtactacctgctcagcctcctgagcctgctggacatcgtgctgtgcctgaccgtgatccccaaggtgctggccatcttctggttcgacctgagaagcatcagctttccagcttgtttcctgcagatgttcattatgaactcctttctgaccatggaaagctgtaccttcatgatcatggcctacgatagatacgtggccatctgcaagcctctgcaatacagcagcatcatcacagaccaatttgtcgctcgggccgctatcttcgtggtggccaggaacggcctgctgaccatgcctatccctatcctgtcttctagactgagatactgcgccggccacatcatcaaaaactgcatctgcaccaacgtgtccgtttccaagctgagctgcgacgacatcactctgaaccagagctaccagttcgtgatcggatggaccctgctgggatctgatctgatcctgatcgtgctgtcttatttcttcatcctgaagaccgtgctgagaatcaaggccgagggcgccatggccaaggccctgggcacctgtggcagccacttcatcctgatcctttttttcacaacagtgctgctggtgctggtcatcaccaatctggccagaaagcggatccctccagatgtgcctatcctccttaatatcctgcatcacctgatcccccccgccctgaatcccattgtgtacggcgtgcggacaaaagagatcaagcagggcatccagaacctgctgcgcagactgtga

SEQ ID NO: 797 - DNA, 966 bp, Artificial Sequence
  OR56B4 consensus-c
atggacacaagcacatctgtgacaaacagctcttccctgcagatcagccagttcatcctgatgggcctgcctggcatccacgagtggcagcactggctgagcctgcctctggctctgctgtacctgctggccctgggcgccaacctgctgatcatgattaccatccagcacgagcctaccctgcatgaacctatgtaccacttcctgggaatcctggctgttgtggatatcggactggctaccaccatcatgcctaagatcctggccattttctggttcgacgccaaggccatcagcctgccagaatgcttcgcccagatctacgccatccactgttttttctgtatggaaagcggcatcttcctgtgcatggccgtggatagatacatcgccatctgccatcctctgcggtatcctagcatcgtgaccgaggccttcgtggtgaaagccaccggctttatggtcctgcggaacggcctgctgacaatcccagtccccgtgctggccgctcaaagacactactgcagcagaaacgagatcgaccactgcctgtgtagcaacctgggcgtcatctctctggcctgcgacgatatcaccgtgaacaagttctaccagctgatgctggcctggatcctggtgggcagcgacatggccctcgtgttcagctcctacgccctgatcctgcacagcgtgctgaggctgaatagcgccgaggccatgtctaaggccctttctacatgcagcagccacctgatcctgattctgttcttctacaccggcatcatcgtgctgagcgtgacccacctggctgaaaagaaaatccccctgatccctgtgttgcttaatgtgctccacaacgtgatcccccccgccctgaaccctatggtgtacgcactccggatgcacgagctgagactgggctttcagagactgctgggactgggccaggacgtgtccaagaagtga

SEQ ID NO: 798 - DNA, 936 bp, Artificial Sequence
  OR5AN1 consensus-c
atgatcggcggaggcaacatcacagaaatcacatacttcatcctgcttggattcagcgatttcccaagaatcatcgccgtgctgttcgtgattttcctggttatctacatcaccaccctgacatggaacctgtctctgattgtgctgattagaatggacagccacctgcacacccctatgtacttctttctgagcaacctgagctttatcgacatctgctacgtgacctctaccgtgcccaagatgctgagcaacttcttccaggagcagcagacaatcacatttgtgggctgtatcgtgcagtactttatcttcagcaccatgggactgagcgagagctgcctgatgaccgccatggcctacgaccggtacgccgctatctgtaatcctctgctctacagcagcatcatgagccctaccctgtgtgtgtggatggtgctgggcagttacatggctggcctgacagccagcctgtcacagctgtgcgctctgctgcagctccatttctgtggccctaacgtgatccggcacttcttctgcgatatgcctcagctgctgatcctgtcctgcaccgatacctttttcgtgcaggtgctgaccgccatcctgaccatgttcttcggcatcgccaatgccctggtcatcatgatcagctacggctacatcgtgatcagcatcatgaaaatcacaagcgccaagggcaggagcaaggccttcaacacctgcgcctcccacctgaccgctgtgtccctgttttatacaagcggcatcttcgtctacctgtctagctccagcggcggctcctcttctttcgacagattcgcctctgtgttctacaccgtggtgatccccatgctgaaccccctgatctatagcctgcggaacaaggaaatcaaggacgccctgaagagactgcaaaaaagaaagtgctgctga

SEQ ID NO: 799 - DNA, 930 bp, Artificial Sequence
  M71 consensus-c
atggccgcagaaaaccacagcaccgtgaccgagttcatcctgggcggactgacaaaccggcctgagctgcagctgcctctgttccttcttttcctcggcatctacgtggtgacaatggtgggcaatctgggcatgatcaccctgattggactgaacagccaactgcacacccctatgtacttcttcctgagcaacctgagcctggtcgacctgtgttacagcagcgtgatcaccccaaagatgctggtcaacttcgtgtcccagaagaacctgatcagctacgtgggctgcatgagccagctgtacttcttcctggttttcgtgatcgccgagtgctacatgctgaccgtgatggcctacgatagatacgtggccatctgccaccccctgctgtacaacatcatcatgagccatgccctgtgtagcctgctggttgcttttgtgtacgccatgggcctgatcggatctaccatcgagacaggcctgatgctgaagctgaattactgcgaggatctgatctctcactacttttgcgacatcctgcccctgatgaaactgtcttgcagcagcacctacgacgtggaaatggctgtgtttttcctggccggcttcaacatcatcgtgaccagcctgacagtgctgattagctacgccttcatcctgagctcaatcctgagaatcagctccacagaaggcagaagcaaggccttcagcacctgtagctctcacctggccgccgtgggcctgttctacggctctaccgccttcatgtatctgaagcccagcaccgccagctccctggctcaggagaacgtggcctctgtgttctacacaacagtgatccctatgctcaatcctctgatctattccctgcggaacaaggaagtgaaggccgctctgcagaaaaccctgagaaggaagctgttttga

SEQ ID NO: 800 - DNA, 942 bp, Artificial Sequence
  OR9K2 consensus-c
atgggcgaccggggaacaagcaaccactctgagatgaccgacttcatcctcgtgggcttcagagtgcggcccgagctgcacatcctgcttttcctgctgttcctgctggtctacgccatgatcctgctgggcaacgtgggcatgatggctatcatcatgacagatcctagacttaatacccctatgtattttttcctgggaaatctgagcttcatcgatctgttttacagcagcgtgatcgcccctaaggccatgattaacttctggtccgagagcaagagcatcagcttcgccggctgcgtggcccagctgttcctgtttgccctgttcatcgtcaccgagggattcctgctggccgctatggcctacgacagattcatcgccatctgcaaccctctgctgtattctgtgcagatgagcacaagactgtgtacacagctggtggctggcagctacttctgcggctgtatctccagcgttctgcagaccagcatgaccttcaccctgtctttttgcgcctctagggccattgaccacttctactgcgacagcagacccctgcaaagactgtcttgttccgacctgtttatccataagatgatcagctttagcctgagctgcatcatcatcctgcctaccatcatcgtgatcatcgtgtcctacatgtacatcgtgtctacagtgctgaagatccacagcacagagggcagaaagaaagccttcagcacctgcagcagccacctgggcgtggtgtccgtgctgtacggcgccgtgttcttcatgtacctgaccccagatcggttcccagaactgagcaaagtggcttctctgtgctacagcctggtgacccctatgctgaaccccctgatctacagcctgcggaacaaggacgtgaaggaagccctgaaaaagctgctggaaaagaagaacatcattctgtga

SEQ ID NO: 801 - protein, 318 aa, Homo sapiens
MEGNQTWITDITLLGFQVGPALAILLCGLFSVFYTLTLLGNGVIFGIICLDSKLHTPMYFFLSHLAIIDMSYASNNVPKMLANLMNQKRTISFVPCIMQTFLYLAFAVTECLILVVMSYDRYVAICHPFQYTVIMSWRVCTILVLTSWSCGFALSLVHEILLLRLPFCGPRDVNHLFCEILSVLKLACADTWVNQVVIFATCVFVLVGPLSLILVSYMHILGAILKIQTKEGRIKAFSTCSSHLCVVGLFFGIAMVVYMVPDSNQREEQEKMLSLFHSVFNPMLNPLIYSLRNAQLKGALHRALQRKRSMRTVYGLCL

SEQ ID NO: 802 - protein, 310 aa, Homo sapiens
MESNQTWITEVILLGFQVDPALELFLFGFFLLFYSLTLMGNGIILGLIYLDSRLHTPMYVFLSHLAIVDMSYASSTVPKMLANLVMHKKVISFAPCILQTFLYLAFAITECLILVMMCYDRYVAICHPLQYTLIMNWRVCTVLASTCWIFSFLLALVHITLILRLPFCGPQKINHFFCQIMSVFKLACADTRLNQVVLFAGSAFILVGPLCLVLVSYLHILVAILRIQSGEGRRKAFSTCSSHLCVVGLFFGSAIVMYMAPKSSHSQERRKILSLFYSLFNPILNPLIYSLRNAEVKGALKRVLWKQRSM

SEQ ID NO: 803 - protein, 309 aa, Homo sapiens
MGAKNNVTEFVLFGLFESREMQHTCFVVFFLFHVLTVLGNLLVIITINARKTLKSPMYFFLSQLSFADICYPSTTIPKMIADTFVEHKIISFNGCMTQLFSAHFFGGTEIFLLTAMAYDRYVAICRPLHYTAIMDCRKCGLLAGASWLAGFLHSILQTLLTVQLPFCGPNEIDNFFCDVHPLLKLACADTYMVGLIVVANSGMISLASFFILIISYVIILLNLRSQSSEDRRKAVSTCGSHVITVLLVLMPPMFMYIRPSTTLAADKLIILFNIVMPPLLNPLIYTLRNNDVKNAMRKLFRVKRSLGEK

SEQ ID NO: 804 - protein, 309 aa, Homo sapiens
MDISEGNKTLVTEFVLTGLTDRPWLHVLFFVVFLVVYLITMVGNLGLIVLIWNDPHLHMPMYLFLGGLAFSDACTSTSITPRMLVNFLDKTAMISLAECITQFYFFASSATTECFLLVMMAYDRYVAICNPLLYPVMMSNKLSAQLLSISYVIGFLHPLVHVSLLLRLTFCRFNIIHYFYCEILQLFKISCNGPSINALMIFIFGAFIQIPTLMTIIISYTRVLFDILKKKSEKGRSKAFSTCGAHLLSVSLYYGTLIFMYVRPASGLAEDQDKVYSLFYTIIIPLLNPFIYSLRNKKVMHALRRVIRK

SEQ ID NO: 805 - protein, 314 aa, Homo sapiens
MENKTEVTQFILLGLTNDSELQVPLFITFPFIYIITLVGNLGIIVLIFWDSCLHNPMYFFLSNLSLVDFCYSSAVTPIVMAGFLIEDKVISYNACAAQMYIFVAFATVENYLLASMAYDRYAAVCKPLHYTTTMTTTVCARLAIGSYLCGFLNASIHTGDTFSLSFCKSNEVHHFFCDIPAVMVLSCSDRHISELVLIYVVSFNIFIALLVILISYTFIFITILKMHSASVYQKPLSTCASHFIAVGIFYGTIIFMYLQPSSSHSMDTDKMAPVFYTMVIPMLNPLVYSLRNKEVKSAFKKVVEKAKLSVGWSV

SEQ ID NO: 806 - protein, 314 aa, Homo sapiens
MMASERNQSSTPTFILLGFSEYPEIQVPLFLVFLFVYTVTVVGNLGMIIIIRLNSKLHTIMCFFLSHLSLTDFCFSTVVTPKLLENLVVEYRTISFSGCIMQFCFACIFGVTETFMLAAMAYDRFVAVCKPLLYTTIMSQKLCALLVAGSYTWGIVCSLILTYFLLDLSFCESTFINNFICDHSVIVSASYSDPYISQRLCFIIAIFNEVSSLIIILTSYMLIFTTIMKMRSASGRQKTFSTCASHLTAITIFHGTILFLYCVPNPKTSSLIVTVASVFYTVAIPMLNPLIYSLRNKDINNMFEKLVVTKLIYH

SEQ ID NO: 807 - protein, 314 aa, Homo sapiens
MMMVLRNLSMEPTFALLGFTDYPKLQIPLFLVFLLMYVITVVGNLGMIIIIKINPKFHTPMYFFLSHLSFVDFCYSSIVTPKLLENLVMADKSIFYFSCMMQYFLSCTAVVTESFLLAVMAYDRFVAICNPLLYTVAMSQRLCALLVAGSYLWGMFGPLVLLCYALRLNFSGPNVINHFFCEYTALISVSGSDILIPHLLLFSFATFNEMCTLLIILTSYVFIFVTVLKIRSVSGRHKAFSTWASHLTSITIFHGTILFLYCVPNSKNSRQTVKVASVFYTVVNPMLNPLIYSLRNKDVKDAFWKLIHTQVPFH

SEQ ID NO: 808 - protein, 328 aa, Homo sapiens
MFLTERNTTSEATFTLLGFSDYLELQIPLFFVFLAVYGFSVVGNLGMIVIIKINPKLHTPMYFFLNHLSFVDFCYSSIIAPMMLVNLVVEDRTISFSGCLVQFFFFCTFVVTELILFAVMAYDHFVAICNPLLYTVAISQKLCAMLVVVLYAWGVACSLTLACSALKLSFHGFNTINHFFCELSSLISLSYPDSYLSQLLLFTVATFNEISTLLIILTSYAFIIVTTLKMPSASGHRKVFSTCASHLTAITIFHGTILFLYCVPNSKNSRHTVKVASVFYTVVIPLLNPLIYSLRNKDVKDAIRKIINTKYFHIKHRHWYPFNFVIEQ

SEQ ID NO: 809 - protein, 313 aa, Homo sapiens
MLLTDRNTSGTTFTLLGFSDYPELQVPLFLVFLAIYNVTVLGNIGLIVIIKINPKLHTPMYFFLSQLSFVDFCYSSIIAPKMLVNLVVKDRTISFLGCVVQFFFFCTFVVTESFLLAVMAYDRFVAICNPLLYTVNMSQKLCVLLVVGSYAWGVSCSLELTCSALKLCFHGFNTINHFFCEFSSLLSLSCSDTYINQWLLFFLATFNEISTLLIVLTSYAFIVVTILKMRSVSGRRKAFSTCASHLTAITIFHGTILFLYCVPNSKNSRHTVKVASVFYTVVIPMLNPLIYSLRNKDVKDTVTEILDTKVFSY

SEQ ID NO: 810 - protein, 312 aa, Homo sapiens
MADDNFTVVTEFILLGLTDHAELKAVLFVVFLVIYAITLLRNLGMILLIQITSKLHTPMYFLLSCLSFVDACYSSAIAPKMLVNLLVVKATISFSACMVQHLCFGVFITTEGFLLSVMAYDRYVAIVSPLLYTVAMSDRKCVELVTGSWIGGIVNTLIHTISLRRLSFCRLNAVSHFFCDIPSLLKLSCSDTSMNELLLLTFSGVIAMATFLTVIISYIFIAFASLRIHSASGRQQAFSTCASHLTAVTIFYGTLIFSYIQPSSQYFVEQEKVVSMFYTLGIPMLNLLIHSLRNKDVKEAVKRAIEMKHFLC

SEQ ID NO: 811 - protein, 321 aa, Homo sapiens
MARENHSLAAEFILIGFTNYPELKTLLFVVFSAIYLVTMVGNLGLVALIYVERRLLTPMYIFLGNLALMDSCCSCAVTPKMLENFFSEDRIISLYECMAQFYFLCLAETTDCFLLATMAYDRYVAICHPLQYHTMMSKTLCIRMTTGAFKAGNLHSMIHVGLLLRLTFCRSNKIHHFFCDILPLYRLSCTDPSINELMIYIFSIPIQIFTIATVLISYLCILLTVFKMKSKEGRGKAFSTCASHFLSVSIFYICLLMYIGPSEEGDKDTPVAIFYAIVIPLLNPFIYSLRNKEVINVLKKIMRNYNILKQTCSIANLFLIY

SEQ ID NO: 812 - protein, 311 aa, Homo sapiens
MGKENCTTVAEFILLGLSDVPELRVCLFLLFLLIYGVTLLANLGMIALIQVSSRLHTPMYFFLSHLSSVDFCYSSIIVPKMLANIFNKDKAISFLGCMVQFYLFCTCVVTEVFLLAVMAYDRFVAICNPLLYTVTMSWKVRVELASCCYFCGTVCSLIHLCLALRIPFYRSNVINHFFCDLPPVLSLACSDITVNETLLFLVATLNESVTIMIILTSYLLILTTILKMGSAEGRHKAFSTCASHLTAITVFHGTVLSIYCRPSSGNSGDADKVATVFYTVVIPMLNSVIYSLRNKDVKEALRKVMGSKIHS

SEQ ID NO: 813 - protein, 311 aa, Homo sapiens
MGKENCTTVAEFILLGLSDVPELRVCLFLLFLLIYGVTLLANLGMTALIQVSSRLHTPVYFFLSHLSFVDFCYSSIIVPKMLANIFNKDKAISFLGCMVQFYLFCTCGVTEVFLLAVMAYDRFVAICNPLLYMVTMSQKLRVELTSCCYFCGTVCSLIHSSLALRILFYRSNVINHFFCDLPPLLSLACSDVTVNETLLFLVATLNESVTIMIILTSYLLILTTILKIHSAESRHKAFSTCASHLTAITVSHGTILYIYCRPSSGNSGDVDKVATVFYTVVIPMLNPLIYSLRNKDVNKALRKVMGSKIHS

SEQ ID NO: 814 - protein, 315 aa, Homo sapiens
MFSPNHTIVTEFILLGLTDDPVLEKILFGVFLAIYLITLAGNLCMILLIRTNSHLQTPMYFFLGHLSFVDICYSSNVTPNMLHNFLSEQKTISYAGCFTQCLLFIALVITEFYILASMALDRYVAICSPLHYSSRMSKNICVCLVTIPYMYGFLSGFSQSLLTFHLSFCGSLEINHFYCADPPLIMLACSDTRVKKMAMFVVAGFNLSSSLFIILLSYLFIFAAIFRIRSAEGRHKAFSTCASHLTIVTLFYGTLFCMYVRPPSEKSVEESKITAVFYTFLSPMLNPLIYSLRNTDVILAMQQMIRGKSFHKIAV

SEQ ID NO: 815 - protein, 307 aa, Homo sapiens
MLNFTDVTEFILLGLTSRREWQVLFFIIFLVVYIITMVGNIGMMVLIKVSPQLNNPMYFFLSHLSFVDVWFSSNVTPKMLENLLSDKKTITYAGCLVQCFFFIALVHVEIFILAAMAFDRYMAIGNPLLYGSKMSRVVCIRLITFPYIYGFLTSLAATLWTYGLYFCGKIEINHFYCADPPLIKMACAGTFVKEYTMIILAGINFTYSLTVIIISYLFILIAILRMRSAEGRQKAFSTCGSHLTAVIIFYGTLIFMYLRRPTEESVEQGKMVAVFYTTVIPMLNPMIYSLRNKDVKKAMMKVISRSC

SEQ ID NO: 816 - protein, 311 aa, Homo sapiens
MRRNCTLVTEFILLGLTSRRELQILLFTLFLAIYMVTVAGNLGMIVLIQANAWLHMPMYFFLSHLSFVDLCFSSNVTPKMLEIFLSEKKSISYPACLVQCYLFIALVHVEIYILAVMAFDRYMAICNPLLYGSRMSKSVCSFLITVPYVYGALTGLMETMWTYNLAFCGPNEINHFYCADPPLIKLACSDTYNKELSMFIVAGWNLSFSLFIICISYLYIFPAILKIRSTEGRQKAFSTCGSHLTAVTIFYATLFFMYLRPPSKESVEQGKMVAVFYTTVIPMLNLIIYSLRNKNVKEALIKELSMKIYFS

SEQ ID NO: 817 - protein, 310 aa, Homo sapiens
MPNFTDVTEFTLLGLTCRQELQVLFFVVFLAVYMITLLGNIGMIILISISPQLQSPMYFFLSHLSFADVCFSSNVTPKMLENLLSETKTISYVGCLVQCYFFIAVVHVEVYILAVMAFDRYMAGCNPLLYGSKMSRTVCVRLISVPYVYGFSVSLICTLWTYGLYFCGNFEINHFYCADPPLIQIACGRVHIKEITMIVIAGINFTYSLSVVLISYTLIVVAVLRMRSADGRRKAFSTCGSHLTAVSMFYGTPIFMYLRRPTEESVEQGKMVAVFYTTVIPMLNPMIYSLRNKDVKEAVNKAITKTYVRQ

SEQ ID NO: 818 - protein, 315 aa, Homo sapiens
MLSPNHTIVTEFILLGLTDDPVLEKILFGVFLAIYLITLAGNLCMILLIRTNSQLQTPMYFFLGHLSFVDICYSSNVTPNMLHNFLSEQKTISYAGCFTQCLLFIALVITEFYFLASMALDRYVAICSPLHYSSRMSKNICISLVTVPYMYGFLNGLSQTLLTFHLSFCGSLEINHFYCADPPLIMLACSDTRVKKMAMFVVAGFTLSSSLFIILLSYLFIFAAIFRIRSAEGRHKAFSTCASHLTIVTLFYGTLFCMYVRPPSEKSVEESKIIAVFYTFLSPMLNPLIYSLRNRDVILAIQQMIRGKSFCKIAV

SEQ ID NO: 819 - protein, 305 aa, Homo sapiens
MSNTNGSAITEFILLGLTDCPELQSLLFVLFLVVYLVTLLGNLGMIMLMRLDSRLHTPMYFFLTNLAFVDLCYTSNATPQMSTNIVSEKTISFAGCFTQCYIFIALLLTEFYMLAAMAYDRYVAIYDPLRYSVKTSRRVCICLATFPYVYGFSDGLFQAILTFRLTFCRSSVINHFYCADPPLIKLSCSDTYVKEHAMFISAGFNLSSSLTIVLVSYAFILAAILRIKSAEGRHKAFSTCGSHMMAVTLFYGTLFCMYIRPPTDKTVEESKIIAVFYTFVSPVLNPLIYSLRNKDVKQALKNVLR

SEQ ID NO: 820 - protein, 322 aa, Homo sapiens
MNSLKDGNHTALTGFILLGLTDDPILRVILFMIILSGNLSIIILIRISSQLHHPMYFFLSHLAFADMAYSSSVTPNMLVNFLVERNTVSYLGCAIQLGSAAFFATVECVLLAAMAYDRFVAICSPLLYSTKMSTQVSVQLLLVVYIAGFLIAVSYTTSFYFLLFCGPNQVNHFFCDFAPLLELSCSDISVSTVVLSFSSGSIIVVTVCVIAVCYIYILITILKMRSTEGHHKAFSTCTSHLTVVTLFYGTITFIYVMPNFSYSTDQNKVVSVLYTVVIPMLNPLIYSLRNKEIKGALKRELVRKILSHDACYFSRTSNNDIT

SEQ ID NO: 821 - protein, 326 aa, Homo sapiens
MSGLPSDMDLYKLQLNNFTEVTMFILISFTEEFDVQVFLFLLFLAIYLFTLIGNLGLVVPIIGDFWLHSPMYYFLGVLSFLDVCYSTVVTPKMLVNFLAKNKSISFLGCATQMFLACTFGTTECFLLAAMAYDRYVAIYNPLLYSVSMSPRVYVPLITASYVASILHATIHTVATFSLSFCGSNEIRHVFCNMPPLLAISCSDTHVIQLLFFYFVGSIEIVTILIVLISYGFILLAILKMQSAEGRRKVFSTCGAHLTGVTIYHGTILFMYVRPSSSYTSDNDMIVSIFYTIVIPMLNPIIYSLRNKDVKEAIKRLLVRNWFINKL

SEQ ID NO: 822 - protein, 318 aa, Homo sapiens
MKNVTEVTLFVLKGFTDNLELQTIFFFLFLAIYLFTLMGNLGLILVVIRDSQLHKPMYYFLSMLSSVDACYSSVITPNMLVDFTTKNKVISFLGCVAQVFLACSFGTTECFLLAAMAYDRYVAIYNPLLYSVSMSPRVYMPLINASYVAGILHATIHTVATFSLSFCGANEIRRVFCDIPPLLAISYSDTHTNQLLLFYFVGSIELVTILIVLISYGLILLAILKMYSAEGRRKVFSTCGAHLTGVSIYYGTILFMYVRPSSSYASDHDMIVSIFYTIVIPLLNPVIYSLRNKDVKDSMKKMFGKNQVINKVYFHTKK

SEQ ID NO: 823 - protein, 322 aa, Homo sapiens
MDKLSSGLDIYRNPLKNKTEVTMFILTGFTDDFELQVFLFLLFFAIYLFTLIGNLGLVVLVIEDSWLHNPMYYFLSVLSFLDACYSTVVTPKMLVNFLAKNKSISFIGCATQMLLFVTFGTTECFLLAAMAYDHYVAIYNPLLYSVSMSPRVYVPLITASYVAGILHATIHIVATFSLSFCGSNEIRHVFCDMPPLLAISCSDTHTNQLLLFYFVGSIEIVTILIVLISCDFILLSILKMHSAKGRQKAFSTCGSHLTGVTIYHGTILVSYMRPSSSYASDHDIIVSIFYTIVIPKLNPIIYSLRNKEVKKAVKKMLKLVYK

SEQ ID NO: 824 - protein, 313 aa, Homo sapiens
MGNWSTVTEITLIAFPALLEIRISLFVVLVVTYTLTATGNITIISLIWIDHRLQTPMYFFLSNLSFLDILYTTVITPKLLACLLGEEKTISFAGCMIQTYFYFFLGTVEFILLAVMSFDRYMAICDPLHYTVIMNSRACLLLVLGCWVGAFLSVLFPTIVVTRLPYCRKEINHFFCDIAPLLQVACINTHLIEKINFLLSALVILSSLAFTTGSYVYIISTILRIPSTQGRQKAFSTCASHITVVSIAHGSNIFVYVRPNQNSSLDYDKVAAVLITVVTPLLNPFIYSLRNEKVQEVLRETVNRIMTLIQRKT

SEQ ID NO: 825 - protein, 312 aa, Homo sapiens
MDTGNWSQVAEFIILGFPHLQGVQIYLFLLLLLIYLMTVLGNLLIFLVVCLDSRLHTPMYHFVSILSFSELGYTAATIPKMLANLLSEKKTISFSGCLLQIYFFHSLGATECYLLTAMAYDRYLAICRPLHYPTLMTPTLCAEIAIGCWLGGLAGPVVEISLISRLPFCGPNRIQHVFCDFPPVLSLACTDTSINVLVDFVINSCKILATFLLILCSYVQIICTVLRIPSAAGKRKAISTCASHFTVVLIFYGSILSMYVQLKKSYSLDYDQALAVVYSVLTPFLNPFIYSLRNKEIKEAVRRQLKRIGILA

SEQ ID NO: 826 - protein, 317 aa, Homo sapiens
MRNLSGGHVEEFVLVGFPTTPPLQLLLFVLFFAIYLLTLLENALIVFTIWLAPSLHRPMYFFLGHLSFLELWYINVTIPRLLAAFLTQDGRVSYVGCMTQLYFFIALACTECVLLAVMAYDRYLAICGPLLYPSLMPSSLATRLAAASWGSGFFSSMMKLLFISQLSYCGPNIINHFFCDISPLLNLTCSDKEQAELVDFLLALVMILLPLLAVVSSYTAIIAAILRIPTSRGRHKAFSTCAAHLAVVVIYYSSTLFTYARPRAMYTFNHNKIISVLYTIIVPFFNPAIYCLRNKEVKEAFRKTVMGRCHYPRDVQD

SEQ ID NO: 827 - protein, 317 aa, Homo sapiens
MQPYTKNWTQVTEFVMMGFAGIHEAHLLFFILFLTMYLFTLVENLAIILVVGLDHRLRRPMYFFLTHLSCLEIWYTSVTVPKMLAGFIGVDGGKNISYADCLSQLFIFTFLGATECFLLAAMAYDRYVAICMPLHYGAFVSWGTCIRLAAACWLVGFLTPILPIYLLSQLTFYGPNVIDHFSCDASPLLALSCSDVTWKETVDFLVSLAVLLASSMVIAVSYGNIVWTLLHIRSAAERWKAFSTCAAHLTVVSLFYGTLFFMYVQTKVTSSINFNKVVSVFYSVVTPMLNPLIYSLRNKEVKGALGRVFSLNFWKGQ

SEQ ID NO: 828 - protein, 323 aa, Homo sapiens
MNPENWTQVTSFVLLGFPSSHLIQFLVFLGLMVTYIVTATGKLLIIVLSWIDQRLHIQMYFFLRNFSFLELLLVTVVVPKMLVVILTGDHTISFVSCIIQSYLYFFLGTTDFFLLAVMSLDRYLAICRPLRYETLMNGHVCSQLVLASWLAGFLWVLCPTVLMASLPFCGPNGIDHFFRDSWPLLRLSCGDTHLLKLVAFMLSTLVLLGSLALTSVSYACILATVLRAPTAAERRKAFSTCASHLTVVVIIYGSSIFLYIRMSEAQSKLLNKGASVLSCIITPLLNPFIFTLRNDKVQQALREALGWPRLTAVMKLRVTSQRK

SEQ ID NO: 829 - protein, 312 aa, Homo sapiens
MRNGTVITEFILLGFPVIQGLQTPLFIAIFLTYILTLAGNGLIIATVWAEPRLQIPMYFFLCNLSFLEIWYTTTVIPKLLGTFVVARTVICMSCCLLQAFFHFFVGTTEFLILTIMSFDRYLTICNPLHHPTIMTSKLCLQLALSSWVVGFTIVFCQTMLLIQLPFCGNNVISHFYCDVGPSLKAACIDTSILELLGVIATILVIPGSLLFNMISYIYILSAILRIPSATGHQKTFSTCASHLTVVSLLYGAVLFMYLRPTAHSSFKINKVVSVLNTILTPLLNPFIYTIRNKEVKGALRKAMTCPKTGHAK

SEQ ID NO: 830 - protein, 309 aa, Homo sapiens
MTLRNSSSVTEFILVGLSEQPELQLPLFLLFLGIYVFTVVGNLGLITLIGINPSLHTPMYFFLFNLSFIDLCYSCVFTPKMLNDFVSESIISYVGCMTQLFFFCFFVNSECYVLVSMAYDRYVAICNPLLYMVTMSPRVCFLLMFGSYVVGFAGAMAHTGSMLRLTFCDSNVIDHYLCDVLPLLQLSCTSTHVSELVFFIVVGVITMLSSISIVISYALILSNILCIPSAEGRSKAFSTWGSHIIAVALFFGSGTFTYLTTSFPGSMNHGRFASVFYTNVVPMLNPSIYSLRNKDDKLALGKTLKRVLF

SEQ ID NO: 831 - protein, 311 aa, Homo sapiens
MAAENSSFVTQFILAGLTDQPGVQIPLFFLFLGFYVVTVVGNLGLITLIRLNSHLHTPMYFFLYNLSFIDFCYSSVITPKMLMSFVLKKNSISYAGCMTQLFFFLFFVVSESFILSAMAYDRYVAICNPLLYMVTMSPQVCFLLLLGVYGMGFAGAMAHTACMMGVTFCANNLVNHYMCDILPLLECACTSTYVNELVVFVVVGIDIGVPTVTIFISYALILSSIFHIDSTEGRSKAFSTCSSHIIAVSLFFGSGAFMYLKPFSLLAMNQGKVSSLFYTTVVPMLNPLIYSLRNKDVKVALKKILNKNAFS

SEQ ID NO: 832 - protein, 310 aa, Homo sapiens
MAAKNSSVTEFILEGLTHQPGLRIPLFFLFLGFYTVTVVGNLGLITLIGLNSHLHTPMYFFLFNLSLIDFCFSTTITPKMLMSFVSRKNIISFTGCMTQLFFFCFFVVSESFILSAMAYDRYVAICNPLLYTVTMSCQVCLLLLLGAYGMGFAGAMAHTGSIMNLTFCADNLVNHFMCDILPLLELSCNSSYMNELVVFIVVAVDVGMPIVTVFISYALILSSILHNSSTEGRSKAFSTCSSHIIVVSLFFGSGAFMYLKPLSILPLEQGKVSSLFYTIIVPVLNPLIYSLRNKDVKVALRRTLGRKIFS

SEQ ID NO: 833 - protein, 308 aa, Homo sapiens
MTMENYSMAAQFVLDGLTQQAELQLPLFLLFLGIYVVTVVGNLGMILLIAVSPLLHTPMYYFLSSLSFVDFCYSSVITPKMLVNFLGKKNTILYSECMVQLFFFVVFVVAEGYLLTAMAYDRYVAICSPLLYNAIMSSWVCSLLVLAAFFLGFLSALTHTSAMMKLSFCKSHIINHYFCDVLPLLNLSCSNTHLNELLLFIIAGFNTLVPTLAVAVSYAFILYSILHIRSSEGRSKAFGTCSSHLMAVVIFFGSITFMYFKPPSSNSLDQEKVSSVFYTTVIPMLNPLIYSLRNKDVKKALRKVLVGK

SEQ ID NO: 834 - protein, 311 aa, Homo sapiens
MSGENNSSVTEFILAGLSEQPELQLPLFLLFLGIYVVTVVGNLGMTTLIWLSSHLHTPMYYFLSSLSFIDFCHSTVITPKMLVNFVTEKNIISYPECMTQLYFFLVFAIAECHMLAAMAYDRYMAICSPLLYSVIISNKACFSLILGVYIIGLVCASVHTGCMFRVQFCKFDLINHYFCDLLPLLKLSCSSIYVNKLLILCVGAFNILVPSLTILCSYIFIIASILHIRSTEGRSKAFSTCSSHMLAVVIFFGSAAFMYLQPSSISSMDQGKVSSVFYTIIVPMLNPLIYSLRNKDVHVSLKKMLQRRTLL

SEQ ID NO: 835 - protein, 311 aa, Homo sapiens
MAAENHSFVTKFILVGLTEKSELQLPLFLVFLGIYVVTVLGNLGMITLIGLSSHLHTPMYCFLSSLSFIDFCHSTVITPKMLVNFVTEKNIISYPECMTQLYFFLVFAIAECHMLAAMAYDGYVAICSPLLYSIIISNKACFSLILVVYVIGLICASAHIGCMFRVQFCKFDVINHYFCDLISILKLSCSSTYINELLILIFSGINILVPSLTILSSYIFIIASILRIRYTEGRSKAFSTCSSHISAVSVFFGSAAFMYLQPSSVSSMDQGKVSSVFYTIVVPMLNPLIYSLRNKDVHVALKKTLGKRTFL

SEQ ID NO: 836 - protein, 312 aa, Homo sapiens
MMGRRNNTNVADFILMGLTLSEEIQMALFMLFLLIYLITMLGNVGMILIIRLDLQLHTPMYFFLTHLSFIDLSYSTVVTPKTLANLLTSNYISFTGCFAQMFFFAFLGTAECYLLSSMAHDRYAAICSPLHYTVIMSKRLCLALITGPYVIGFIDSFVNVVSMSRLHFYDSNVIHHFFCDTSPILALSCTDTYNTEILIFIIVGSTLMVSLFTISASYVFILFTILKINSTSGKQKAFSTCVSHLLGVTIFYSTLIFTYLKPRKSYSLGRDQVASVFYTIVIPVLNPLIYSLRNKEVKNAVIRVMQRRQDSR

SEQ ID NO: 837 - protein, 310 aa, Homo sapiens
MAGNNFTEVTVFILSGFANHPELQVSLFLMFLFIYLFTVLGNLGLITLIRMDSQLHTPMYFFLSNLAFIDIFYSSTVTPKALVNFQSNRRSISFVGCFVQMYFFVGLVCCECFLLGSMAYNRYIAICNPLLYSVVMSQKVSNWLGVMPYVIGFTSSLISVWVISSLAFCDSSINHFFCDTTALLALSCVDTFGTEMVSFVLAGFTLLSSLLIITVTYIIIISAILRIQSAAGRQKAFSTCASHLMAVTIFYGSLIFTYLQPDNTSSLTQAQVASVFYTIVIPMLNPLIYSLRNKDVKNALLRVIHRKLFP

SEQ ID NO: 838 - protein, 316 aa, Homo sapiens
MAPENFTRVTEFILTGVSSCPELQIPLFLVFLVLYGLTMAGNLGIITLTSVDSRLQTPMYFFLQHLALINLGNSTVIAPKMLINFLVKKKTTSFYECATQLGGFLFFIVSEVIMLALMAYDRYVAICNPLLYMVVVSRRLCLLLVSLTYLYGFSTAIVVSSYVFSVSYCSSNIINHFYCDNVPLLALSCSDTYLPETVVFISAATNVVGSLIIVLVSYFNIVLSILKICSSEGRKKAFSTCASHMMAVTIFYGTLLFMYVQPRSNHSLDTDDKMASVFYTLVIPMLNPLIYSLRNKDVKTALQRFMTNLCYSFKTM

SEQ ID NO: 839 - protein, 319 aa, Homo sapiens
MNHVVKHNHTAVTKVTEFILMGITDNPGLQAPLFGLFLIIYLVTVIGNLGMVILTYLDSKLHTPMYFFLRHLSITDLGYSTVIAPKMLVNFIVHKNTISYNWYATQLAFFEIFIISELFILSAMAYDRYVAICKPLLYVIIMAEKVLWVLVIVPYLYSTFVSLFLTIKLFKLSFCGSNIISYFYCDCIPLMSILCSDTNELELIILIFSGCNLLFSLSIVLISYMFILVAILRMNSRKGRYKAFSTCSSHLTVVIMFYGTLLFIYLQPKSSHTLAIDKMASVFYTLLIPMLNPLIYSLRNKEVKDALKRTLTNRFKIPI

SEQ ID NO: 840 - protein, 312 aa, Homo sapiens
MEQHNLTTVNEFILTGITDIAELQAPLFALFLMIYVISVMGNLGMIVLTKLDSRLQTPMYFFLRHLAFMDLGYSTTVGPKMLVNFVVDKNIISYYFCATQLAFFLVFIGSELFILSAMSYDLYVAICNPLLYTVIMSRRVCQVLVAIPYLYCTFISLLVTIKIFTLSFCGYNVISHFYCDSLPLLPLLCSNTHEIELIILIFAAIDLISSLLIVLLSYLLILVAILRMNSAGRQKAFSTCGAHLTVVIVFYGTLLFMYVQPKSSHSFDTDKVASIFYTLVIPMLNPLIYSLRNKDVKYALRRTWNNLCNIFV

SEQ ID NO: 841 - protein, 307 aa, Homo sapiens
MGQHNLTVLTEFILMELTRRPELQIPLFGVFLVIYLITVVGNLTMIILTKLDSHLHTPMYFSIRHLAFVDLGNSTVICPKVLANFVVDRNTISYYACAAQLAFFLMFIISEFFILSAMAYDRYVAICNPLLYYVIMSQRLCHVLVGIQYLYSTFQALMFTIKIFTLTFCGSNVISHFYCDDVPLLPMLCSNAQEIELLSILFSVFNLISSFLIVLVSYMLILLAICQMHSAEGRKKAFSTCGSHLTVVVVFYGSLLFMYMQPNSTHFFDTDKMASVFYTLVIPMLNPLIYSLRNEEVKNAFYKLFEN

SEQ ID NO: 842 - protein, 309 aa, Homo sapiens
MAHINCTQATEFILVGLTDHQELKMPLFVLFLSIYLFTVVGNLGLILLIRADTSLNTPMYFFLSNLAFVDFCYSSVITPKMLGNFLYKQNVISFDACATQLGCFLTFMISESLLLASMAYDRYVAICNPLLYMVVMTPGICIQLVAVPYSYSFLMALFHTILTFRLSYCHSNIVNHFYCDDMPLLRLTCSDTRFKQLWIFACAGIMFISSLLIVFVSYMFIISAILRMHSAEGRQKAFSTCGSHMLAVTIFYGTLIFMYLQPSSSHALDTDKMASVFYTVIIPMLNPLIYSLQNKEVKEALKKIIINKN

SEQ ID NO: 843 - protein, 305 aa, Homo sapiens
MQRSNHTVTEFILLGFTTDPGMQLGLFVVFLGVYSLTVVGNSTLIVLICNDSCLHTPMYFFTGNLSFLDLWYSSVYTPKILVTCISEDKSISFAGCLCQFFFSAGLAYSECYLLAAVAYDRYVAISKPLLYAQAMSIKLCALLVAVSYCGGFINSSIITKKTFSFNFCRENIIDDFFCDLLPLVELACGEKGGYKIMMYFLLASNVICPAVLILASYLFIITSVLRISSSKGYLKAFSTCSSHLTSVTLYYGSILYIYALPRSSYSFDMDKIVSTFYTVVFPMLNLMIYSLRNKDVKEALKKLLP

SEQ ID NO: 844 - protein, 312 aa, Homo sapiens
MEVGNCTILTEFILLGFSADSQWQPILFGVFLMLYLITLSGNMTLVILIRTDSHLHTPMYFFIGNLSFLDFWYTSVYTPKILASCVSEDKRISLAGCGAQLFFSCVVAYTECYLLAAMAYDRHAAICNPLLYSGTMSTALCTGLVAGSYIGGFLNAIAHTANTFRLHFCGKNIIDHFFCDAPPLVKMSCTNTRVYEKVLLGVVGFTVLSSILAILISYVNILLAILRIHSASGRHKAFSTCASHLISVMLFYGSLLFMYSRPSSTYSLERDKVAALFYTVINPLLNPLIYSLRNKDIKEAFRKATQTIQPQT

SEQ ID NO: 845 - protein, 314 aa, Homo sapiens
MAKNNLTRVTEFILMGFMDHPKLEIPLFLVFLSFYLVTLLGNVGMIMLIQVDVKLYTPMYFFLSHLSLLDACYTSVITPQILATLATGKTVISYGHCAAQFFLFTICAGTECFLLAVMAYDRYAAIRNPLLYTVAMNPRLCWSLVVGAYVCGVSGAILRTTCTFTLSFCKDNQINFFFCDLPPLLKLACSDTANIEIVIIFFGNFVILANASVILISYLLIIKTILKVKSSGGRAKTFSTCASHITAVALFFGALIFMYLQSGSGKSLEEDKVVSVFYTVVIPMLNPLIYSLRNKDVKDAFRKVARRLQVSLSM

SEQ ID NO: 846 - protein, 326 aa, Homo sapiens
MCPLTLQVTGLMNVSEPNSSFAFVNEFILQGFTCEWTIQIFLFSLFTTTYALTITGNGAIAFVLWCDWRLHTPMYMFLGNFSFLEIWYVSSTVPKMLVNFLSEKKNISFAGCFLQFYFFFSLGTSECLLLTVMAFDQYLAICRPLLYPNIMTGHLCAKLVILCWVCGFLWFLIPIVLISQMPFCGPNIIDHVVCDPGPRFALDCVSAPRIQLFCYTLSSLVIFGNFLFIIGSYTLVLKAVLGMPSSTGRHKAFSTCGSHLAVVSLCYSSLMVMYVSPGLGHSTGMQKIETLFYAMVTPLFNPLIYSLQNKEIKAALRKVLGSSNII

SEQ ID NO: 847 - protein, 317 aa, Homo sapiens
MLTFHNVCSVPSSFWLTGIPGLESLHVWLSIPFGSMYLVAVVGNVTILAVVKIERSLHQPMYFFLCMLAAIDLVLSTSTIPKLLGIFWFGACDIGLDACLGQMFLIHCFATVESGIFLAMAFDRYVAICNPLRHSMVLTYTVVGRLGLVSLLRGVLYIGPLPLMIRLRLPLYKTHVISHSYCEHMAVVALTCGDSRVNNVYGLSIGFLVLILDSVAIAASYVMIFRAVMGLATPEARLKTLGTCASHLCAILIFYVPIAVSSLIHRFGQCVPPPVHTLLANFYLLIPPILNPIVYAVRTKQIRESLLQIPRIEMKIR

SEQ ID NO: 848 - protein, 324 aa, Homo sapiens
MPLFNSLCWFPTIHVTPPSFILNGIPGLERVHVWISLPLCTMYIIFLVGNLGLVYLIYYEESLHHPMYFFFGHALSLIDLLTCTTTLPNALCIFWFSLKEINFNACLAQMFFVHGFTGVESGVLMLMALDRYVAICYPLRYATTLTNPIIAKAELATFLRGVLLMIPFPFLVKRLPFCQSNIISHTYCDHMSVVKLSCASIKVNVIYGLMVALLIGVFDICCISLSYTLILKAAISLSSSDARQKAFSTCTAHISAIIITYVPAFFTFFAHRFGGHTIPPSLHIIVANLYLLLPPTLNPIVYGVKTKQIRKSVIKFFQGDKGAG

SEQ ID NO: 849 - protein, 315 aa, Homo sapiens
MTTHRNDTLSTEASDFLLNCFVRSPSWQHWLSLPLSLLFLLAVGANTTLLMTIWLEASLHQPLYYLLSLLSLLDIVLCLTVIPKVLTIFWFDLRPISFPACFLQMYIMNCFLAMESCTFMVMAYDRYVAICHPLRYPSIITDHFVVKAAMFILTRNVLMTLPIPILSAQLRYCGRNVIENCICANMSVSRLSCDDVTINHLYQFAGGWTLLGSDLILIFLSYTFILRAVLRLKAEGAVAKALSTCGSHFMLILFFSTILLVFVLTHVAKKKVSPDVPVLLNVLHHVIPAALNPIIYGVRTQEIKQGMQRLLKKGC

SEQ ID NO: 850 - protein, 314 aa, Homo sapiens
MEFTDRNYTLVTEFILLGFPTRPELQIVLFLMFLTLYAIILIGNIGLMLLIRIDPHLQTPMYFFLSNLSFVDLCYFSDIVPKMLVNFLSENKSISYYGCALQFYFFCTFADTESFILAAMAYDRYVAICNPLLYTVVMSRGICMRLIVLSYLGGNMSSLVHTSFAFILKYCDKNVINHFFCDLPPLLKLSCTDTTINEWLLSTYGSSVEIICFIIIIISYFFILLSVLKIRSFSGRKKTFSTCASHLTSVTIYQGTLLFIYSRPSYLYSPNTDKIISVFYTIFIPVLNPLIYSLRNKDVKDAAEKVLRSKVDSS

SEQ ID NO: 851 - protein, 310 aa, Artificial Sequence
  OR2A2 consensus-c
MGGNQSWVTEFILVGFQLSAEMEILLFWIFSLFYIFSLLANGMILGLICLDSRLHTPMYFFLSHLAIIDMSYASNNVPKMLANLVNQKRTISFVPCIMQTFLYLAFAATECLILVVMSYDRFVAICHPLQYTVIMSWRVCTILALTSWSCGFALSLVHAILLLRLPFCGPREVNHLFCEILSVLKLACADTWINQVVIFAACVFVLVGPLCLMLVSYMHILWAILKIQSKEGRIKAFSTCSSHLCVVGLFFGIAMVVYMVPDSNQREEQEKMLSLFHSLFNPMLNPLIYSLRNAQVKGALHRALQKKRSM

SEQ ID NO: 852 - protein, 310 aa, Artificial Sequence
  OR2A12 consensus-c
MGSNQTWITEVILLGFQVDPALELFLFGFFLLFYSLTLMGNGIILGLICLDSRLHTPMYFFLSHLAIVDMSYASSTVPKMLANLVMQKKTISFAPCILQTFLYLAFAVTECLILVVMSYDRYVAICHPLQYTVIMSWRVCTVLAATCWIFSFLLALVHITLILRLPFCGPQKINHFFCQIMSVFKLACADTRLNQVVLFAGSVFVLVGPLCLVLVSYLRILVAILRIQSGEGRRKAFSTCSSHLCVVGLFFGSAIVMYMAPKSSHSQEQRKILSLFYSLFNPMLNPLIYSLRNAEVKGALRRVLWKQRSM

SEQ ID NO: 853 - protein, 309 aa, Artificial Sequence
  OR4S1 consensus-c
MGAKNNVTEFVLFGLFQSREMQHTCFVVFSLFHVLTVLGNLLVIITINASKTLKAPMYFFLSHLSFADMCYPSATTPKMIADTFVERKTISFNGCMTQLFSAHFFGGTEIFLLTAMAYDRYVAICRPLHYTTIMDRRKCGLLAGASWVAGFLHSILQTLLTVQLPFCGPNEIDNFFCDVHPLLKLACADTYVVGLIVVANSGMISLVSFIILIISYVVILLNLRSQSSEGRRKALSTCGSHIITVLLVLVPPMFMYIRPSTTLAADKLVILFNIVMPPLLNPLIYTLRNNEVKNAMRKLFRVKGSLGEK

SEQ ID NO: 854 - protein, 307 aa, Artificial Sequence
  OR5AC2 consensus-c
MSEGNKTLVTEFVLTGLTERPWLQVLLFLVFLVIYLITMVGNLGLMALIWKDAHLHTPMYLFLGGLAFADACTSTSVTPRMLVNFLDKTAMISLAECITQFYFFASSATTECFLLVVMAYDRYVAICNPLLYPVVMSNRLCTQLISISYAIGFLHPLIHVSLLLRLTFCRSNIIHYFYCEILQLFKISCNDPSINALMIFIFAAFIQISTLMTIIISYTRVLFDILKKKSEKGRSKAFSTCSAHLLSVSLYYGTLIFMYVRPASGLAEDQDKMYSLFYTIIIPLLNPFIYSLRNKEVIGALRRVIKK

SEQ ID NO: 855 - protein, 312 aa, Artificial Sequence
  OR5B3 consensus-c
MENKTEVTQFILLGLTNDPELQVPLFIMFTLIYLITLVGNLGMIVLILLDSRLHTPMYFFLSNLSLVDFCYSSAVTPIVMAGFLIGDKVISYNACAAQMFFFVAFATVENYLLASMAYDRYAAVCKPLHYTTTMTTTVCARLAIGSYLCGFLNASIHTGDTFSLSFCKSNVVHHFFCDIPAVMVLSCSDRHVSELVLVYVVSFNIFFALLVILISYIFIFITILKMHSASGYQKALSTCASHFTAVSIFYGTIIFMYLQPSSSHSMDTDKMASVFYTMVIPMLNPLVYSLRNKEVKSAFKKVVEKAKLSLGW

SEQ ID NO: 856 - protein, 313 aa, Artificial Sequence
  OR5D13 consensus-c
MMASEGNQSSTPTFILLGFSEYPELQVPLFLVFLTIYTVTVLGNLGMIIIIRINPKLHTPMYFFLSHLSFVDFCYSTVVTPKLLENLVVEDRTISFTGCIMQFFFACIFGVTETFMLAVMAYDRFVAVCNPLLYTVIMSQKLCALLVAGSYSWGIVCSLTLTYFLLDLSFCGSNIINNFVCEHSVIVSVSCSDPYISQRLCFVIAIFNEVSSLIIILTSYMFIFITVMKMPSAGGRQKAFSTCASHLTAITIFHGTILFLYCVPNSKTSWLIVKVASVFYTVVIPMLNPLIYSLRNKDVKETVRKLVVTKLIY

SEQ ID NO: 857 - protein, 314 aa, Artificial Sequence
  OR5D14 consensus-c
MVMVLRNLSVETTFALLGFTDYPELQIPLFLVFLLMYIITVVGNLGMIVIIKINPKFHTPMYFFLSHLSFVDFCYSSIVTPKLLENLVMADKSIFYFSCMLQYFLSCTAVVTESFLLAVMAYDRFVAICNPLLYTVAMSQRLCALLVAGSYLWGMFGPLVLLCYALQLNFSGPNVINHFFCEYTALIAVSSSDIHIPHLLLFGFATFNEVSTLLIILTSYVFIFVTVLKIRSASGRRKAFSTCASHLTAITIFHGTILSLYCVPNSKNSRQTVKVASVFYTVVNPMLNPLIYSLRNKDVKDAFWKLIHTKVPFH

SEQ ID NO: 858 - protein, 314 aa, Artificial Sequence
  OR5D16 consensus-c
MFLTERNTTSEATFTLLGFSDYPELQVPLFLVFLAIYSFSVVGNLGMIVIIKINPKLHTPMYFFLSHLSFVDFCYSSIIAPKMLVNLVVEDRTISFSGCMVQFFFFCTFVVTELILFAVMAYDRFVAICNPLLYTVVMSQKLCAMLVVGSYAWGVACSLTLTCSALKLSFHGFNTINHFFCELSSLISLSCSDSYLSQLLLFTVATFNEISTLLIILTSYAFIVVTTLKMPSASGHRKVFSTCASHLTAITIFHGTILFLYCVPNSKNSRHTVKVASVFYTVVIPMLNPLIYSLRNKDVKDTVRKIMNTKYFSI

SEQ ID NO: 859 - protein, 313 aa, Artificial Sequence
  OR5D18 consensus-c
MLLSERNKSGATFTLLGFSDYPELQVPLFLVFLAIYSVTVVGNIGMIVIIKINPKLHTPMYFFLSHLSFVDFCYSSIIAPKMLVNLVVEDRTISFLGCVVQFFFFCTFVVTESFLLAVMAYDRFVAICNPLLYTVAMSQKLCAMLVVGSYAWGVACSLILTCSALKLSFHGFNTINHFFCEFSSLLSLSCSDTYINQLLLFIFATFNEVSTLLIILTSYVFIVVTILKMRSASGRRKAFSTCASHLTAITIFHGTILFLYCVPNSKNSRHTVKVASVFYTVVIPMLNPLIYSLRNKDVKDTVTKIMDTKVFSY

SEQ ID NO: 860 - protein, 312 aa, Artificial Sequence
  OR5J2 consensus-c
MAEDNFTVVTEFILLGLTDHAELKAVLFVLFLVIYAITLVGNLGMIFLIQITPKLHTPMYFFLSCLSFVDACYSSAIAPKMLINLLVVKGTISFSACMVQHLCFGVFVTTEGFLLSVMAYDRYVAIVNPLLYTVAMSKRKCVGLVTGSWICGIINSLIHTISLGRLSFCRLNVVSHFFCDIPSLLKLSCSDTSMNELLLLTFSGVIAMATFLIVIISYMFIVFAILRIHSAAGRQKAFSTCASHLTAVTIFYGTLSFSYIQPSSQYSVEQEKVVSVFYTLVIPMLNPLIYSLRNKEVKDAVKRAIEMKHFPC

SEQ ID NO: 861 - protein, 313 aa, Artificial Sequence
  OR5K4 consensus-c
MAKENHSLTTEFILIGFTDHPELKTLLFVVFSAIYLITMVGNLGLVALIYMERRLHTPMYIFLGNLALMDSCCSCAITPKMLENFFSEDRIISLYECMAQFYFLCLAETADCFLLAAMAYDRYVAICSPLQYHTMMSKKLCIQMTTGAFIASNLHSMIHVGLLLRLTFCRSNQIDHFFCDILPLYRLSCTDPSINELMIYIFSMPIQIFTIATVLISYLCILFTIFKMKSKEGRGKAFSTCASHFLSVSIFYICLLMYIRPFEEGDKDIPVAIFYTIVIPLLNPFIYSLRNKEVINVLKKIMRNYNILKQTCS

SEQ ID NO: 862 - protein, 311 aa, Artificial Sequence
  OR5L1 consensus-c
MGEENCTTVTEFILLGLSDVPELRVFLFLLFLLIYGVTVLGNLGMIALIQVSSRLHTPMYFFLSHLSFVDFCYSTIIVPKMLANILNKDKAISFLGCMVQFYLFCTCVVTEVFLLAVMAYDRFVAICNPLLYMVTMSWKLCVELVSCCYLCGTVCSLIHLCLALEIPSYRSNVINHFFCDLPPLLSLACSDVTVNELLLFIVATFNESVTIVIILTSYLFILITILRMRSAEGRRKAFSTCASHLTAITVFHGTILFIYCRPSSGNSGDTDKVATVFYTVVIPMLNPLIYSLRNKDVKEALRKVVGSKIFS

SEQ ID NO: 863 - protein, 311 aa, Artificial Sequence
  OR5L2 consensus-c
MGKENCTTVTEFILLGLSDVPELRVFLFLLFLLIYGVTVLGNLGMIALIQVSSRLHTPMYFFLSHLSFVDFCYSTIIVPKMLANILNKDKAISFLGCMVQFYLFCTCGVTEVFLLAVMAYDRFVAICNPLLYMVTMSQKLCVELVSCCYLCGTVCSLIHLCLALEIPSYRSNVINHFFCDLPPLLSLACSDVTVNELLLYIVATFNEIITIVIILTSYLFILITILRMHSAEGRHKAFSTCASHLTAITVSHGTILFIYCRPSSGNSGDTDKVATVFYTVVIPMLNPLIYSLRNKDVKEALRKVMGSKIHS

SEQ ID NO: 864 - protein, 315 aa, Artificial Sequence
  OR5M1 consensus-c
MFSPNHTIVTEFILLGLTDDPVLEKILFGVFLVIYLITLAGNLCMILLIRTNSHLQTPMYFFLGHLSFVDICYSSNITPNMLHNFLSDQKTISYAGCFTQCLLFIALVITEFYILASMALDRYVAICSPLHYSSRMSKNICICLVTVPYMYGFLNGLSQSLLTFHLSFCGSLEINHFYCADPPLIMLACSDTRVKKMAMFVVAGFTLSSSLFIILLSYLFIFAAILRIRSAEGRHKAFSTCGSHLTTVTLFYGTLFCMYLRPPSEKSVEESKIIAVFYTFLSPMLNPLIYSLRNKDVILAMQQMIRGKSFHKIAV

SEQ ID NO: 865 - protein, 310 aa, Artificial Sequence
  OR5M3 consensus-c
MLNFTDVTEFILLGLTSRREWQVLFFIIFLVVYIITMVGNIGMIVLIKVSPQLNSPMYFFLSHLSFVDVWFSSNVTPKMLENLLSETKTISYAGCLVQCFFFIALVHVEIFILAVMAFDRYMAIGNPLLYGSKMSRVVCIRLISFPYIYGFLTSLAATLWTYGLYFCGKIEINHFYCADPPLIKMACAGTFVKEYTMIILAGINFTYSLTVVIISYLFILIAILRMRSAEGRRKAFSTCGSHLTAVIIFYGTLIFMYLRRPTEESVEQGKMVAVFYTTVIPMLNPMIYSLRNKDVKEAMMKVISRSCLTK

SEQ ID NO: 866 - protein, 311 aa, Artificial Sequence
  OR5M8 consensus-c
MRRNFTSVTEFILLGLTSRLELQILFFTLFLAIYMVTVAGNLGMIVLIQVNARLHTPMYFFLSHLSFVDLCFSSNVTPKMLEIFLSEKKTISYPACLVQCYLFIALVHVEIYILAVMAFDRYMAICNPLLYGSKMSKSVCTSLITVPYVYGALTGLMETMWTYNLAFCGPNEINHFYCADPPLIKLACSDTYNKELSMFVVAGWNLSFSLLIILISYLYIFPAILRIRSTEGRQKAFSTCGSHLTAVTIFYATLFFMYLRPPSKESVEQGKMVAVFYTTVIPMLNPMIYSLRNKDVKEALIKELSRKKYFS

SEQ ID NO: 867 - protein, 310 aa, Artificial Sequence
  OR5M9 consensus-c
MPNFTDVTEFILLGLTSRQELQVLFFVVFLVVYMITLLGNIGMIILISISPQLQSPMYFFLSHLSFVDVWFSSNVTPKMLENLLSETKTISYVGCLVQCYFFIALVHVEVYILAVMAFDRYMAICNPLLYGSKMSRTVCVRLISVPYVYGFSVSLICTLWTYGLYFCGNFEINHFYCADPPLIKIACGGVHIKEYTMIVIAGINFTYSLSVVLISYTLIVVAVLRMRSADGRRKAFSTCGSHLTAVTMFYGTLIFMYLRRPTEESVEQGKMVAVFYTTVIPMLNPMIYSLRNKDVKEAVNKAITKANLRQ

SEQ ID NO: 868 - protein, 312 aa, Artificial Sequence
  OR5M10 consensus-c
MSSPNHTIVTEFILLGLTDDPVLEKILFGVFLVIYLITLAGNLCMILLIRTNSHLQTPMYFFLSHLSFVDICYSSNITPNMLHNFLSDQKTISYAGCFTQCLLFIALVITEFYILASMALDRYVAICSPLHYSTRMSKNICISLVTVPYMYGFLNGLSQTLLTFHLSFCGSLEINHFYCADPPLIMLACSDTRVKKMAMFVVAGFTLSSSLFIILLSYLFIFAAILRIRSAEGRHKAFSTCGSHLTTVTIFYGTLFCMYLRPPSEKSVEESKIIAVFYTFLSPMLNPLIYSLRNKDVILAMQQMIKGNLFCK

SEQ ID NO: 869 - protein, 321 aa, Artificial Sequence
  OR5M11 consensus-c
MSNTNGSAITEFILLGLTDRPELQPLLFVLFLVVYLVTLLGNLGMIMLIRLDSRLHTPMYFFLTNLAFVDLCYTSNATPQMLTNFLSEKKTISFAGCFTQCYIFIALLLTEFYMLAAMAYDRYVAICNPLRYSVKMSRRVCICLATFPYVYGFSDGLFQAILTFRLTFCRSNVINHFYCADPPLIKLSCSDTYVKEHAMLISAGFNLSSSLTIILVSYAFIIAAILRIKSAEGRHKAFSTCGSHMMAVTLFYGTLFCMYVRPPTDKTVEESKIIAVFYTFVSPVLNPLIYSLRNKDVKQALKNVLRRNVVTKMAMPPFSNK

SEQ ID NO: 870 - protein, 314 aa, Artificial Sequence
  OR5P2 consensus-c
MDSLKDGNHTALTGFILLGLTDDPILRVILFMIILCIYLVTISGNLGIIILIRISSQLHHPMYFFLSHLAFADMAYSSSVTPNMLVNFLVERNTISYLGCAIQLGSAAFFATVECFLLAAMAYDRFVAICSPLLYSTKMSTQVSVQLLLVAYMAGFLIAVSYTTSFYFLLFCGPNQVNHFFCDFAPLLELSCSDISVSTVVLSFSSGSIIVVTMCVIAISYIYILITILKMRSTEGRHKAFSTCTSHLTAVTLFYGTITFIYVMPKSSYSTDQNKVVSVFYTVVIPMLNPLIYSLRNKEIKGALKRELGRKILS

SEQ ID NO: 871 - protein, 328 aa, Artificial Sequence
  OR5T1 consensus-c
MSGLPSDLDLYRIQLKNVTEVTMFILMGFTDDFEVQVFLFLLFLAIYLFTLIGNLGLVVLVIGDSRLHNPMYYFLSVLSFLDACYSSVVTPKMLVNFLAENKSISFLGCAAQMLLFVTFGTTECFLLAAMAYDRYVAIYNPLLYSVSMSPRVYVPLITASYVGGILHASIHTVATFSLSFCASNEIRHVFCDIPPLLAISCSDTHTNQLLLFYFVGSIEIVTILIVLISYGFILLAILRMHSAEGRRKVFSTCGSHLTGVSIYHGTILFMYVRPSSSYALDHDMIVSIFYTIVIPMLNPIIYSLRNKDVKEAMKRLFGKNWFINKLHF

SEQ ID NO: 872 - protein, 314 aa, Artificial Sequence
  OR5T2 consensus-c
MKNVTEVTLFVLKGFTDNLELQIILFFLFLAIYLFTLMGNLGLVVLVIGDSRLHNPMYYFLSVLSSVDACYSSVITPNMLVDFMSKNKVISFLGCATQMFLAVTFGTTECFLLAAMAYDRYVAIYNPLLYSVSMSPRVYVPLIIASYVGGILHATIHTVATFSLSFCASNEIRHVFCDIPPLLAISCSDTHTNQLLLFYFVGSIEIVTILIVLISYGFILLAILRMHSAEGRRKVFSTCGSHLTGVSIYHGTILFMYVRPSSSYALDHDMIVSIFYTIVIPMLNPIIYSLRNKDVKEAMKRVFGKNQVINKVYF

SEQ ID NO: 873 - protein, 322 aa, Artificial Sequence
  OR5T3 consensus-c
MDKLSSGLDIYRIPLKNKTEVTMFILTGFTDDFELQVFLFLLFLAIYLFTLIGNLGLVVLVIEDSRLHNPMYYFLSVLSFLDACYSTVVTPKMLVNFLAENKSISFIGCATQMLLFVTFGTTECFLLAAMAYDRYVAIYNPLLYSVSMSPRVYVPLITASYVAGILHATIHTVATFSLSFCGSNEIRHVFCDIPPLLAISCSDTHTNQLLLFYFVGSIEIVTILIVLISYGFILLAILKMHSAEGRQKVFSTCGSHLTGVTIYHGTILFSYMRPSSSYASDHDMIVSIFYTIVIPMLNPIIYSLRNKDVKEAMKKLLKLVYK

SEQ ID NO: 874 - protein, 313 aa, Artificial Sequence
  OR6M1 consensus-c
MGNQSTVTEFTLTAFPALLELQISLFVVLLLTYTLTATGNIVIISLIWIDNRLQTPMYFFLSNLSFLDILYTTVVTPKLLACLLGEKKTISFAGCITQTYFYFFLGTVEFILLAVMSFDRYVAICNPLRYTIIMNSRACLLLVLGCWVGAFLSVLCPTIVVSRLPYCRKEINHFFCDIAPLLQVACIDTHFIEMINFLLSSLVLLTSLVFTTVSYTYIISTILRIPSAQGRQKAFSTCASHITVVSIAYGSNIFMYVRPSQSHSLDFDKVTAVLTTVVTPLLNPFIYSLRNEKVKEVLREAVNRIMSLIQRKT

SEQ ID NO: 875 - protein, 312 aa, Artificial Sequence
  OR6N1 consensus-c
MDTGNWSQVTEFIILGFPHLQGVQIYLFLLLLLIYLTTILGNLLIFLVVCLDSRLHTPMYHFVSILSFSELGYTAATIPKMLANLLSEKKTISFSGCLLQIYFFHSLGATECYLLTAMAYDRYLAICRPLHYPTLMTPTLCAEIAIGCWLGGLAGPVVEISLISRLPFCGPNRIQHIFCDFPPVLSLACTDTSINVLVDFVINSCKILATFLLILCSYVQIICTVLRIPSAAGKRKAFSTCASHLTVVLIFYGSILFMYVRLKKSYSLDYDRALAVVYSVLTPFLNPFIYSLRNKEIKEAMRRQLKRIGILA

SEQ ID NO: 876 - protein, 317 aa, Artificial Sequence
  OR6P1 consensus-c
MRNLSGGHVEEFVLVGFPTSPPLQLLLFVLFLAIYLLTLLENALIVSTIWLTPSLHRPMYFFLGHLSFLELWYINVTVPRLLGAFLTQDGRVSYVGCMTQLYFFIALACTECVLLAVMAYDRYLAICEPLRYPSLMPSSLATRLAAASWGSGFFSSMMKLLFISRLSYCGPNIINHFFCDISPLLNLTCSDKEQAELVDFLLALVMILLPLLAVVSSYAAIIAAILRIPTAQGRHKAFSTCASHLAVVVIYYSSTLFTYARPRAMYTFNHNKIISVLYTVIVPFLNPAIYCLRNKEVKDALRKTVLGRCHYPRDVPD

SEQ ID NO: 877 - protein, 317 aa, Artificial Sequence
  OR6Q1 consensus-c
MQPYTKNWTQVTEFVMVGFAGVHEARLLFFILFLTMYLFTLVENLAIILVVGLDHRLRRPMYFFLTHLSCLEIWYTSVTVPKMLAGFIGVDGGKNISYAGCLSQLFIFTFLGATECFLLAAMAYDRYVAICMPLRYGALVSWGTCIRLAAACWLVGFLTPILPIYLMSQLTFCGPNVIDHFFCDASPLLALSCSDVTLKETVDFLVSLAVLLASSMVIAVSYGNIVWTLLHIRSAAERRKAFSTCAAHLTVVSLFYGTLFFMYVRTKVASSINFNKVVSVFYSIVTPMLNPLIYSLRNKEVKGALGRAFSLNSWKGQ

SEQ ID NO: 878 - protein, 317 aa, Artificial Sequence
  OR6T1 consensus-c
MNPENWTQVTSFVLLGFPSSHLLQFLLFLGLMVTYIVTATGNLLIIVLSWIDRRLHTQMYFFLRNLSFLELLLVSVVVPKMLVVILTGDHTISFASCIIQSYLYFLLGTTDFFLLAVMSLDRYLAICRPLHYETLMSGHVCSQLVLASWLAGFLWVLCPTILMASLPFCGPNGIDHFFCDSWPLLRLSCGDTHLLELVAFVLSTSVLLGSLALTSVSYACILATVLRAPTAAERRKAFSTCASHLTVVVIVYGSSIFLYIRMSEAQSKLLNKGASVLSCIITPLLNPFIFSLRNDKVKQALRDALRWHRLTAVRKLS

SEQ ID NO: 879 - protein, 312 aa, Artificial Sequence
  OR6X1 consensus-c
MRNGTVITEFILLGFPVIQGLQTPLFIVIFLIYILTLAGNGLIIAIVWAEPRLQIPMYFFLCNLSFLEIWYTTTVIPKLLETFVVARTVICMSCCLLQAFFHFFLGTTEFFILTIMSFDRYLAICKPLHYPTIMTSKLCLQLALSSWVVGFTIVFCQTMLLIQLPFCGNNVINHFYCDVGPILKAACIDTSILELLGLLATILVIPGSLLFTMISYIYILSTILRIPSATGRQKAFSTCASHLTVVSLLYGAVLFMYLRPTAHSSFKINKVVSVLNTILTPLLNPFIYTIRNKEVKGALRKAMTCPKTGHAK

SEQ ID NO: 880 - protein, 309 aa, Artificial Sequence
  OR8B4 consensus-c
MTLRNSSSVTEFILVGLSEQPELQLPLFLLFLGIYVFTVVGNLGLITLIGLNSSLHTPMYFFLFNLSFIDLCYSCVFTPKMLNDFVSENIISYVGCMTQLFFFCFFVNSECYVLVSMAYDRYVAICNPLLYTVTMSPQVCSLLMFGSYVIGFAGAMAHTGSMLRLTFCDSNIIDHYLCEVLPLLQLSCTSTHVNELVFFIVVGVVITLSSISIFISYALILSNILRIPSAEGRSKAFSTCGSHIIAVALFFGSGAFTYLTTSFPGSMNQGKFASVFYTNVVPMLNPLIYSLRNKDVKLALGKTLKRVLF

SEQ ID NO: 881 - protein, 313 aa, Artificial Sequence
  OR8B8 consensus-c
MKMAAENSSFLTEFILAGLTDQPGVQIPLFFLFLGFYVVTVVGNLGLITLIGLNSHLHTPMYFFLYNLSFIDFCYSSVITPKMLMSFVSKKNSISYAGCMTQLFFFLFFVVSESFILSAMAYDRYVAICNPLLYTVTMSPQVCLLLLLGVYGMGFAGAMAHTACMMGVTFCANNLVNHYMCDILPLLERACTSTYVNELVVFVVVGIDIGVPTVTIFISYALILSSILHIRSTEGRSKAFSTCSSHIIAVSLFFGSGAFMYLKPSSILPMNQGKVSSLFYTTVVPMLNPLIYSLRNKDVKVALKKILNKNAFS

SEQ ID NO: 882 - protein, 310 aa, Artificial Sequence
  OR8B12 consensus-c
MAAKNSSVTEFILAGLTDQPGLQIPLFFLFLGFYMVTVVGNLGLITLIGLNSHLHTPMYFFLFNLSLIDFCYSTTITPKMLMSFVSKKNIILHTGCMTQLFFFCFFVISESFILSAMAYDRYVAICKPLVYTVTMSPQVCLLLLLGVYVMGFSGAMAHTGSIMSLTFCADNLVNHFMCDILPLLELSCNSTYVNELVVFIVVAIDIGMPIVTIFISYALILSSILHIHSTEGRSKAFSTCSSHIIVVSLFFGSGAFMYLKPPSILPLDQGKVSSLFYTIVVPMLNPLIYSLRNKDVKVALRKTLGRKIFS

SEQ ID NO: 883 - protein, 308 aa, Artificial Sequence
  OR8D1 consensus-c
MTMGNHSTAAQFVLVGLTQQPELQLPLFLLFLGIYVVTVVGNLGMILLIAVSPLLHTPMYYFLSSLSFVDLCYSSVITPKMLVNFLGKKNTILYSECMAQLFFFVVFVVAEGYLLTAMAYDRYVAICSPLLYNVIMSSRVCSLLVLVAFILGFLSALAHTSAMMKLSFCKSHIISHYFCDVLPLLNLSCSNTHLNELLLFIIAGFNTLVPTLAVAISYAFIFYSILHIRSSEGRSKAFGTCSSHLMAVGIFFGSITFMYFKPPSSNSLEQEKVSSVFYTTVIPMLNPLIYSLRNKDVKKALRKVLVGK

SEQ ID NO: 884 - protein, 311 aa, Artificial Sequence
  OR8G1 consensus-c
MAGGNHSTVTEFILAGLTEQPELQLPLFLLFLGIYVVTVVGNLGMITLIGLSSHLHTPMYYFLSSLSFIDLCHSTVITPKMLVNFVTEKNIISYPECMTQLYFFLVFAISECHMLAAMAYDRYVAICSPLLYNVIMSHQACFSLILGVYIIGLVCASAHTGCMFRVHFCKFDVINHYFCDLLPLLKLSCSSTYVNELLILCFGAFNILVPSLTILSSYIFIIASILRIRSTEGRSKAFSTCSSHILAVAIFFGSAAFMYLQPSSVSSMDQGKVSSVFYTIIVPMLNPLIYSLRNKDVHVALKKMLERRTFL

SEQ ID NO: 885 - protein, 311 aa, Artificial Sequence
  OR8G5 consensus-c
MAAGNHSTVTEFILAGLTEKPELQLPLFFLFLGIYVVTVVGNLGMITLIGLSSHLHTPMYYFLSSLSFIDLCHSTVITPKMLVNFVTEKNIISYPECMTQLYFFLVFAIAECYMLAAMAYDRYVAICSPLLYNVIMSHQACFSLILGVYIIGLVCASAHTGCMFRVHFCKFDVINHYFCDLLSLLKLSCSSTYVNELLILVFSGINILAPSLTILSSYIFIIASILRIRSTEGRSKAFSTCSSHISAVAVFFGSAAFMYLQPSSVSSMDQGKVSSVFYTIVVPMLNPLIYSLRNKDVNVALKKMLEKRIFL

SEQ ID NO: 886 - protein, 314 aa, Artificial Sequence
  OR8H2 consensus-d
MGRRNNTNVADFILMGLTDSEEIQLVLFMLFLLIYLITVLGNVGMILIIRLDLQLHTPMYFFLSHLSFLDLSYSTVITPKTLENLLTSTKYISFTGCFTQMYFFVFLGATECFLLSSMAYDRYVAICNPLHYPVVMSKRLCCALITGSYVIGFIDSFVNVLCMSRLHFCDSNVIHHFFCDTSPILALSCTDTYDTEIMIFIIAGSTLMVSLITISVSYVSILSTILKINSTSGKQKAFSTCASHLLGVTIFYGTMIFTYLKPRKSYSLGKDQVASVFYTIVIPMLNPLIYSLRNKEVKNALIRVMQKREDSRLK

SEQ ID NO: 887 - protein, 310 aa, Artificial Sequence
  OR8I2 consensus-c
MAGNNFTEVTVFILSGFANHPELQVSLFLMFLFIYLFTVLGNLGLIMLIRIDSQLHTPMYFFLSNLAFIDIFYSSTVTPKALVNFQSNQKTISFVGCFVQMYFFVGLVCSECFLLGSMAYDRYVAICNPLLYSVVMSQKVCNWLGVMPYVIGFTNSLISVCVISSLAFCDSSINHFFCDTTALLALSCVDAFSTEMVIFVLAGFTLLSSLLIITVTYIAIISAILRIQSAAGRQKAFSTCASHLMGVTIFYGSLIFTYLQPDNTSSLTQAQVASVFYTIVIPMLNPLIYSLRNKDVKNALLRVIHRKLFP

SEQ ID NO: 888 - protein, 315 aa, Artificial Sequence
  OR8J1 consensus-c
MAPENFTRVTEFILTGVSDCPELQIPLFLVFLVIYGLTVAGNLGIITLTSVDSRLQTPMYFFLRHLAIINLGNSTVIAPKMLINFLVKKKTTSYYECATQLGGFLVFIVAEVIMLAVMAYDRYVAICNPLLYMVVVSRRLCLLLVSLTYLYSFSTAIVVSSSVFSVSYCSSNVINHFYCDNVPLLALSCSDTYFPETVVFISAATNLVGSLIIVLVSYFNIVLSILRIRSSEGRKKAFSTCASHMMAVTVFYGTLLFMYLQPRSNHSLDTDKMASVFYTLVIPMLNPMIYSLRNKDVKAALQRFLTNLCYSFKTM

SEQ ID NO: 889 - protein, 316 aa, Artificial Sequence
  OR8K1 consensus-c
MEKHNHTAVTKVTEFILMGITDNPGLQAPLFGIFLIIYLVTVIGNLGMVILTHLDSKLHTPMYFFLRHLSITDLGYSTVIGPKMMVNFVVHKNTISYNWCATQLAFFEIFIITELFILSAMAYDRYVAICKPLLYVVIMAEKVLWVLVLVPYLYSTFVSLFLTIKLFKLSFCGSNIISYFYCDCLPLISILCSDTHELELIILIFSGCNLLSSLLIVLVSYMFILVAILRMNSREGRYKAFSTCSSHLTVVVVFYGTLLFIYLQPKSSHTFAIDKMASVFYTLVIPMLNPLIYSLRNKEVKDALKRTLTNRCKIPT

SEQ ID NO: 890 - protein, 313 aa, Artificial Sequence
  OR8K3 consensus-c
MEKHNLTVLNEFILMGITDRPELQAPLFGLFLIIYVISVVGNLGMIILTKVDSRLQTPMYFFLRHLAFTDLGYSTTVGPKMLVNFVVDQNTISYYFCATQLAFFLVFIGSELFILSAMSYDRYVAICNPLLYTVIMSQRVCQVLVAIPYLYSTFVSLLVTIKIFTLSFCGYNVISHFYCDSLPLLSLLCSNTHEIELIILILAAFDLISSLLIVLVSYLLILVAILRMNSAEGRQKAFSTCGSHLTVVIVFYGTLIFMYVQPKSSHSFDTDKVASIFYTLVIPMLNPLIYSLRNKDVKYALQRTWKKLCNIFS

SEQ ID NO: 891 - protein, 310 aa, Artificial Sequence
  OR8K5 consensus-c
MGQQNLTVLTEFILMGVTRRPELQLPLFGVFLIIYLITVVGNLGMIILTKLDSRLHTPMYFFIRHLAFIDLGNSTVICPKMLVNFVVDQNTISYYACATQLAFFLMFIISEFFILSAMAYDRYVAICNPLLYNVIMSQRLCHVLVGIPYLYSTFQALMFTIKIFTLTFCGSNVISHFYCDDVPLLPMLCSNAQEIELLIILFSAFNLISSLLVVLVSYMLILLAIFRMHSAEGRKKAFSTCGSHLTVVVVFYGSLLFMYMQPKSTHSFDTDKMASVFYTLVIPMLNPLIYSLRNKEVKNAFYRVFCKLCI

SEQ ID NO: 892 - protein, 319 aa, Artificial Sequence
  OR8U1 consensus-c
MAQINCTQVKEFILVGLTDQQELKMPLFVLFLSIYLFTVVGNLGLILVIRTDSRLNTPMYFFLSNLAFVDFCYASVITPKMLGNFLYKQNVISFNACAAQLGCFLTFMVSECLLLASMAYDRYVAICNPLLYMVVMSPGICIQLVAVPYSYSFLMALFHTILTFRLSYCHSNIINHFYCDDMPLLRLTCSDTHSKQLWIFACAGITFISSVLIVFVSYMFIISAILRMRSAEGRQKAFSTCGSHMLAVTIFYGTLIFMYLQPSSSHSLDTDKMASVFYTVIIPMLNPLIYSLRNKDVKEALKKIIINKNQASGFLKFKK

SEQ ID NO: 893 - protein, 305 aa, Artificial Sequence
  OR9G1 consensus-c
MERSNHTVTEFILLGFTTDPVMQLVLFVVFLGVYSLTVVGNSTLIVLICNDSRLHTPMYFFIGNLSFLDLWYSSVYTPKILVTCISEDKSISFAGCVCQFFFSAGLAYSECYLLAAMAYDRYMAISKPLLYSQAMSIKLCAFLVAVSYLGGFINSSIITKRTFSLNFCRDNVIDDFFCDLLPLVKLACGRKDGYQIMLYFLLASNVITPAVLILASYLFIIATILRIRSTQGRLKAFSTCSSHLTSVTLYYGSILYIYARPRSSYSLDMDKIVSTFYTVVFPMLNPMIYSLRNKDVKEALNKLLK

SEQ ID NO: 894 - protein, 312 aa, Artificial Sequence
  OR9G4 consensus-c
MEVGNRTILTEFILLGFSADPQWQLILFGIFLMLYLITLSGNMTLVILIRIDSRLHTPMYFFIGNLSFLDFWYTSVYTPKILASCVSEDKRISLAGCGAQLFFSCVVAYTECYLLAAMAYDRHAAICNPLLYSGTMSTSLCTGLVAGSYIGGFLNAIAHTANTFRLSFCGKNIIDHFFCDAPPLVKMSCTDTRVYEKVLLGVVGFTVLSSILAILISYFNILLAILRIRSASGRRKAFSTCASHLISVMLFYGSLLFMYSRPSSTYSLERDKVAALFYTVVNPLLNPLIYSLRNKDVKEAFRKATQTIRPQT

SEQ ID NO: 895 - protein, 314 aa, Artificial Sequence
  OR9I1 consensus-c
MAKNNLTTVTEFILMGFTDHPKLEIPLFLVFLSFYLVTLLGNVGMIILIQVDVQLHTPMYFFLSHLSLLDACYTSVITPQILATLATGKTVISYGHCAAQFFFFTICAGTECFLLAVMAYDRYVAISNPLLYTVAMNPRLCWSLVVGAYVCGVSGAILRTTCTFTLSFCDDNQINFFFCDLPPLLKLACSDTTNIEIVIVFFGNFVILANALVILISYLLIIKAILRVKSSGGRAKTFSTCASHLTAVALFFGTLIFMYLRSGSGKSLEEDKVVSVFYTVVIPMLNPLIYSLRNKDVKAAFRKVTGRLQVSLSM

SEQ ID NO: 896 - protein, 315 aa, Artificial Sequence; identical to SEQ ID NO: 590
  OR11H12 consensus-c

SEQ ID NO: 897 - protein, 317 aa, Artificial Sequence
  OR52M1 consensus-c
MLTFHNVCSVPSSFWLTGIPGLESLHIWLSIPFGSMYLVAVVGNVTILAVVKVERSLHQPMYFFLCMLAVIDLVLSTSTMPKLLGIFWFGAGDIGLDACLAQMFLIHCFATVESGIFLAMAFDRYVAICDPLRHTMVLTHTVVGRLGLAALLRGVLYIGPLPLMIRLRLPLYKTHVISHSYCEHMAVVTLACGDSRVNNVYGLSIGFLVLILDSVAIAASYVMIFRAVMGLATPEARLKTLGTCGSHICAILIFYVPIAVSSLIHRFGHCVPPPIHTLLANFYLLIPPILNPIVYAVRTKQIRERLLQILKIETKIR

SEQ ID NO: 898 - protein, 317 aa, Artificial Sequence
  OR52N5 consensus-c
MLVSNNSYVAPPSFILNGIPGLERVHVWISLPLCTMYIISLVGNLGLVYLIHYEESLHRPMYFFLAMLSLIDLFTCTTTLPNALCIFWFNLKEINFNACLVQMFFVHGFTGVESGVLMLMALDRYVAICYPLRYATILTNPIIAKAGLATFLRGVLLMIPFPFLVKRLPFCQSNIISHTYCDHMSVVKLSCASIKVNVIYGLMVALLIGVFDICCISVSYTMILRAVVSLSSADARQKAFSTCTAHISAIIITYVPAFFTFFTHRFGGHTIPPSLHIIVANLYLLLPPTLNPIVYGVKTKQIRDSVIKFFQGEKGAG

SEQ ID NO: 899 - protein, 315 aa, Artificial Sequence
  OR56A3 consensus-c
MTAHQNGTLSTEVSDFLLNCFVRSPSWQLWLSLPLSLLFLLAMGANTTLLITIRLEASLHEPMYYLLSLLSLLDIVLCLTVIPKVLAIFWFDLRSISFPACFLQMYIMNCFLAMESCTFMVMAYDRYVAICHPLRYPSIITDQFVVKAAIFILARNVLMTLPIPILSARLHYCGRNVIENCICANMSVSRLSCDDVTINRLYQFAGGWTLLGSDLILIFLSYTLILRAVLRLKAEGAVAKALSTCGSHFILILFFSTILLVFVLTHVAKKKVSPDVPVLLNVLHHVIPAALNPIVYGVRTQEIKQGIQRLLKKGW

SEQ ID NO: 900 - protein, 312 aa, Artificial Sequence
  OR5I1 consensus-c
MTDGNYTLVTEFILLGFPTRPELQIVLFLVFLTLYSIILIGNIGLMLLIRIDPHLQTPMYFFLSNLSFVDLCYSSVIVPKMLVNFLSENKSISYYGCALQFYFFCTFADTESFILAAMAYDRYVAICNPLLYTVVMSRGICMRLIVLSYLGGNMSSLVHTSFAFILKYCDKNVINHFFCDLPPLLKLSCTDTTINEWLLSTYGSSVEIICFIIIIISYFFILLSVLKIRSFSGRKKTFSTCASHLTSVTIYQGTLLFIYSRPSYLYSPNTDKIISVFYTIIIPVLNPLIYSLRNKDVKDAAKKVLRSKVDSS

SEQ ID NO: 901 - DNA, 933 bp, Artificial Sequence
  OR2A2 consensus-c
atgggcggcaaccagtcttgggtgaccgagttcatcctggtgggctttcagctgtccgccgagatggaaatcctgctgttctggatcttcagcctgttctacatcttttccctgctggctaatggcatgatcctgggcctgatctgcctggacagcagactgcacacccctatgtacttcttcctgagccatctggcaattatcgacatgtcttatgccagcaacaacgtgcccaagatgctggccaacctggtgaaccagaagcggaccatcagcttcgtgccctgcatcatgcagaccttcctgtacctggcttttgctgctacagagtgcctgatcctcgtggtgatgagctacgacagattcgtggccatttgtcaccctctgcaatacaccgtgatcatgagctggcgggtttgtacaatcctggccctgaccagctggtcctgcggcttcgccctgtccctggtgcacgccatcctgctgctgcgcctgcctttctgcggaccacgggaagtgaaccacctgttttgtgagatcctgtctgtgctgaagctggcctgcgccgatacatggatcaaccaggtggtgatcttcgccgcttgtgtgttcgtgctggtgggacctctgtgcctgatgctggtcagctacatgcacatcctgtgggccatccttaaaatccagagcaaggaaggcagaatcaaggccttcagcacctgcagcagccacctgtgcgtggtgggactgttcttcggcatcgccatggtcgtgtacatggtgcctgatagcaatcaaagagaggaacaggagaagatgctgtctctcttccactctctgtttaaccctatgctgaaccccctgatctacagcctgagaaatgcccaggttaagggcgccctgcacagagccctgcagaaaaagagaagcatgtga

SEQ ID NO: 902 - DNA, 933 bp, Artificial Sequence
  OR2A12 consensus-c
atgggcagcaaccagacatggatcacagaagtgatcctgctgggcttccaggttgatcctgccctggaactgttcctgtttggatttttcctgctgttttacagcctgaccctgatgggcaacggcatcatcctcggcctgatctgcctggacagcagactgcacacccctatgtacttcttcctatctcacctggccattgtggatatgtcttatgcttcctctaccgtgcccaagatgctggctaatctggtgatgcagaagaagaccatcagcttcgccccttgcatcctgcagaccttcctttatctggccttcgccgtgaccgagtgcctgatcctcgtggtgatgtcctacgaccgctacgtggctatttgtcatcctctgcaatacacagtgatcatgagctggcgggtgtgcaccgtgctggccgccacctgctggatcttcagcttcctgttggctctggtgcacatcacactgatcctgagactgccattctgcggcccccagaaaatcaaccacttcttctgtcagatcatgagtgttttcaagctggcatgcgccgacaccagactgaatcaagtggtcctgttcgccggctctgtgttcgtgctggtgggcccactgtgtctggtcctggtgtcctacctgagaatcctggtggccatcctgaggatccagagcggcgagggaagacggaaagcctttagcacatgcagcagccacctctgtgtggtgggactgtttttcggcagcgccatcgtgatgtacatggcccctaagagcagccacagccaggagcagcggaagatcctgtccctgttctacagcctgttcaaccctatgctgaaccccctgatctactctctgagaaacgccgaggtgaagggcgccctgcggagagtgctgtggaagcagagaagcatgtga

SEQ ID NO: 903 - DNA, 930 bp, Artificial Sequence
  OR4S1 consensus-c
atgggagccaagaacaacgtgaccgagttcgttctgttcggcctgtttcagagccgggaaatgcaacacacctgcttcgtggtgttcagcctgtttcacgtgctgacagtgttgggcaacctgctggtcatcatcaccatcaacgccagcaagacactgaaggcccctatgtacttcttcctgtctcacctgtccttcgccgacatgtgctaccctagcgccacaacacctaagatgatcgccgataccttcgtggaaagaaaaaccatctcttttaacggctgtatgacccagctgttttctgctcacttctttggcggcaccgaaatcttcctgctgaccgccatggcctatgatagatacgtggctatctgcagacccctgcactacacaaccatcatggaccggagaaagtgcggactgctggccggagctagctgggtggccggcttcctgcacagcatcctgcagaccctgctaaccgtgcagctgcctttctgtggtcctaacgagatcgacaacttcttctgcgacgtgcaccccctgctgaaactggcatgcgccgacacctacgtggtgggccttattgtggtcgccaacagcggcatgatcagcctggtgtccttcatcatcctgatcatcagctacgtggtgatcctgctcaatctcagaagccagagcagcgagggcagacgcaaagccctgtcaacatgtggcagccatatcattaccgtgctgctggtgctggtcccccccatgttcatgtacatcagaccatctacaacactggccgctgataagctggtgatcctgttcaacatcgtgatgcctccactgctgaatcctctgatctacaccctgcggaacaatgaggtgaagaacgccatgagaaagctgttccgggtgaagggctccctgggcgagaagtga

SEQ ID NO: 904 - DNA, 924 bp, Artificial Sequence
  OR5AC2 consensus-c
atgagcgaaggcaataaaaccctggtgaccgagttcgtgctgaccggcctgaccgagcggccctggctgcaagtgctgctgtttctcgttttcctggtcatctacctgatcacaatggtgggcaacctgggactgatggccctgatctggaaggacgctcacctgcataccccaatgtacctgttcctgggcggcctggcctttgccgacgcctgtacaagcacaagcgtgacacctagaatgctggtgaacttcttggataagaccgccatgatcagcctggccgaatgcatcacccagttctacttcttcgcctccagcgctacaaccgagtgcttcctgctggtggtcatggcctacgatagatacgtggccatttgtaatcctctgctctaccccgtggtgatgagcaaccggctgtgtacccagctgatctctatcagctacgccatcggattcctccaccctcttatccacgtgtccctgctgctgaggctgaccttctgcagatctaacatcatccactacttctactgcgagatcctgcagctgtttaagatctcctgcaacgatcctagcatcaacgccctgatgatcttcatctttgccgcttttatccagatctctaccctgatgaccatcatcatcagctatacaagagtgctgttcgacatcctgaagaagaaatccgagaagggcagaagcaaggccttcagcacctgcagcgcccacctactgagcgtgtctctgtactacggcaccctgatcttcatgtacgtgcggcctgcttctggcctggccgaggaccaggacaagatgtatagcctgttctacacaatcatcatccctctgctgaaccccttcatctacagcctgagaaacaaggaagtgatcggcgccctgcggagagtgattaagaaatga

SEQ ID NO: 905 - DNA, 939 bp, Artificial Sequence
  OR5B3 consensus-c
atggaaaacaagaccgaggtgacccagttcatcctgctgggcctgacaaacgaccccgagctgcaagtgcccctgttcatcatgttcaccctgatctacctgatcaccctggtgggcaacctgggcatgatcgtgctgattctgctggacagccggctgcacacacctatgtacttcttcctgtccaacctgagcctggtggacttctgctacagcagcgccgtgacccctatcgtgatggccggctttctgatcggagataaggtgatttcttacaacgcttgtgccgcccagatgttcttcttcgtggcctttgctacagtggagaattacctgctggccagcatggcctacgaccggtacgccgctgtgtgcaaacctctgcactacaccaccacaatgaccaccaccgtgtgtgccagactggccatcggcagctatctgtgcggcttcctgaacgcctctatccacaccggcgataccttcagcctgagcttctgtaaaagcaacgtggtgcaccacttcttctgcgacatcccagccgtgatggtcctgagctgcagcgacagacacgtgtccgagctggttctggtgtacgtggtctcttttaacatcttctttgctctgctggtcatcctgatcagctacatctttatcttcatcacaatcctcaagatgcacagcgcctccggctaccagaaagccctgtcaacatgcgccagccacttcaccgccgtgtctatcttctacggcaccatcatctttatgtacctgcagccttctagcagccatagcatggacactgataagatggctagcgtgttctatacaatggtgatccccatgctgaatcctctggtgtacagccttagaaacaaggaagttaagtccgccttcaagaaggtggtggaaaaggcaaagctgtctctgggatggtga

SEQ ID NO: 906 - DNA, 942 bp, Artificial Sequence
  OR5D13 consensus-c
atgatggccagcgagggcaaccagagcagcacccctaccttcatcctcctgggcttctctgagtaccctgagctgcaagtgcctctgttcctggtgttcctgacaatctacaccgtgacagtgctgggcaatctgggaatgatcatcattatcagaatcaatcctaagctgcacacccccatgtacttcttcctgagccatctgagcttcgtggacttctgctactctacagtggttacccctaagctgctggagaacctggtcgtggaagatcgcaccatctccttcaccggctgtatcatgcagtttttcttcgcctgcatcttcggtgtgactgagacattcatgctggctgtgatggcctacgaccggttcgtggccgtgtgcaaccccctgctgtataccgtgatcatgagccagaagctttgtgccctgctcgttgctggcagctacagctggggcatcgtgtgcagtctgaccctgacctactttctgctggacctgtctttttgcggaagcaacatcatcaacaactttgtgtgtgaacacagcgtcatcgtgagcgtgtcctgcagcgacccctacatcagccagagactgtgcttcgtgatcgccatcttcaacgaggtgtccagcctgatcatcatcctgacaagctatatgttcatctttatcaccgtcatgaagatgcctagcgccggcggcagacagaaagccttcagcacatgcgccagccacctgaccgctatcacaatcttccacggcacaatcctgtttctgtactgtgtgccaaattctaagacctcttggctgatcgtgaaagtggcctctgtgttctacaccgtggtgattcctatgctgaaccccctgatctactccctgagaaacaaggatgtgaaggaaaccgtgcggaagctggtggtgaccaagctgatctactga

SEQ ID NO: 907 - DNA, 945 bp, Artificial Sequence
  OR5D14 consensus-c
atggtcatggtgctgagaaatctgtctgtggaaaccaccttcgccctgctcggctttaccgactaccccgagctgcaaatccctctgttcctcgtgttcctgctcatgtacatcatcacagtggtgggcaacctgggaatgatcgtgatcatcaagatcaaccccaagttccatacccctatgtattttttcctgagccacctgtccttcgtggacttctgctactcttctattgtgacacctaagctgctggaaaacctggttatggctgataaaagcatcttttacttcagctgtatgctccagtactttctgagctgcaccgccgtggtcacagagagcttcctgctggccgtgatggcctatgatagattcgtggctatctgcaaccctctgctgtacaccgtggccatgagccagagactgtgcgccctgctggtggccggcagctacctgtggggcatgttcggccccctggtgctgctgtgttacgccctgcagctgaacttcagcggcccaaatgtgatcaaccacttcttttgcgagtacaccgccctgatcgccgtgtcctccagcgacatccacatcccccacctgctgctgttcggcttcgctacattcaacgaggtgtctaccctgctgatcatcctgacaagctacgtgttcatcttcgtgactgtgctgaagatcaggtccgccagcggaagacggaaggccttcagcacatgtgcctctcacctgaccgccatcaccatcttccacggcaccatcctgagcctgtactgcgtgcctaactcaaagaacagcagacagaccgttaaagtggctagcgtgttctacaccgtggtcaaccctatgctgaatcctctgatctacagcctgcggaacaaggacgtgaaagacgccttttggaagctgattcacacaaaggtgccattccactga

SEQ ID NO: 908 - DNA, 945 bp, Artificial Sequence
  OR5D16 consensus-c
atgttcctgacagagagaaataccaccagcgaggccaccttcaccctgcttggattcagcgactaccccgagctgcaagtgcccctgttcctggtgttcctggccatctactcctttagcgtggtgggcaatctgggcatgatcgtgatcatcaagatcaacccaaagctgcacacacctatgtacttcttcctgagccacctgagctttgtggacttttgctacagctccatcatcgcccctaagatgctggtgaacctggtggttgaagatagaaccatcagcttcagcggatgtatggtgcagttcttcttcttctgcacatttgtggtgactgagctgattctgttcgccgtgatggcctacgacagattcgtggccatctgcaaccccctcctgtatacagtggtgatgagccagaagctgtgcgccatgctggtcgtcggcagctatgcttggggcgtggcatgcagcctgaccctgacctgctccgctctgaaactgagcttccacggctttaacaccatcaatcacttcttctgtgaactgagctccctgatttctctgtcctgctctgatagctacctgagccagctgctgctgttcaccgtggctacattcaacgaaatctctacactgttaatcatcctgacaagctacgcctttatcgtggtgaccaccctgaagatgcctagcgccagcggccataggaaggtgttctccacctgtgcctctcacctgaccgccataacaatcttccacggcacaatcctgtttctgtactgcgtgcctaactctaagaacagcagacacaccgttaaggtggccagcgtgttctacaccgtggtcatccctatgctcaaccctctgatctactctctgcggaacaaggacgtgaaagacaccgtgcggaaaatcatgaacaccaagtacttcagcatctga

SEQ ID NO: 909 - DNA, 942 bp, Artificial Sequence
  OR5D18 consensus-c
atgctgctgagtgaacggaacaaaagcggcgccacattcaccctgctcggcttttctgattaccccgagctgcaggtgcccctgttcctggtgttcctggccatctacagcgtgaccgtggttggaaatatcggcatgatcgtgatcattaagatcaatccaaagctgcacacccctatgtacttcttcctgtcccacctgagcttcgtcgacttctgttacagcagcatcatcgcccctaagatgctggtcaacctggtcgtggaagatagaaccatcagctttctgggctgcgtggtgcaatttttcttcttctgcaccttcgtggtgacagagagcttcctgctggccgtgatggcctacgacagattcgtggctatctgcaaccctctgctgtacaccgttgctatgagccagaaactgtgcgccatgctggtggtgggcagctacgcctggggagtggcttgtagcctgatcctgacctgttctgccctgaagctgtctttccatggcttcaacaccatcaaccacttcttttgcgagttctccagcctgcttagcctgagctgcagcgacacctacatcaaccagctgctgctgtttatcttcgccacctttaatgaggtgtccacactgctcatcatcctgacatcttatgtgttcatcgtggtgacaatcctcaagatgcggagcgcctcaggcagacggaaggccttcagcacatgcgcctctcacctgaccgccatcacaattttccacggcaccatcctgttcctgtactgcgtgcctaactccaagaacagcagacacaccgtgaaagtggcttctgtgttctacaccgtggtcatccctatgctgaaccccctgatctatagcctgagaaacaaggatgtgaaggacaccgtgaccaagatcatggacacaaaggtgtttagctactga

SEQ ID NO: 910 - DNA, 939 bp, Artificial Sequence
  OR5J2 consensus-c
atggccgaggacaacttcaccgtggtgacagagttcatcctgctgggactgacagatcacgccgaactgaaagccgtgctgtttgtgctgtttctggtgatctacgccatcaccctggtcggcaacctgggcatgatctttctgatccaaatcacacccaagctgcacacccctatgtacttcttcctgagctgtctgagcttcgtggatgcctgctacagctctgctattgcccctaagatgctgatcaacctgctggtcgtgaaaggcacaatcagcttcagcgcctgtatggtgcagcacctgtgcttcggcgtgttcgtgaccaccgagggcttccttctctctgtgatggcctacgacagatacgtggccatcgtgaaccccctgctgtacaccgtggccatgagcaagcggaagtgcgtgggactggtgaccggcagctggatctgcggcatcatcaattctctgatccacacaatctccctgggaagactgagtttttgcagactgaacgtggtgtcccatttcttctgcgacatccccagcctgctgaagctgagctgcagcgacaccagcatgaacgagctgctgctgctgacctttagcggcgtgatcgccatggctacatttctgatcgttattatcagctacatgttcatcgtgttcgccattctgcggatccacagcgctgctggcagacagaaggccttctccacctgcgcctctcacctgaccgccgtgaccatcttctacggcaccctgtccttcagctacatccagcctagcagccagtattctgtggaacaggagaaggtggtcagcgttttctatacactggtgatccctatgctgaatcctctgatctacagcctcagaaacaaggaagtgaaggacgccgtgaaacgggccatcgagatgaagcacttcccatgttga

SEQ ID NO: 911 - DNA, 942 bp, Artificial Sequence
  OR5K4 consensus-c
atggccaaggaaaatcacagcctgacaaccgagttcatcctgatcggcttcaccgatcaccccgagctgaaaaccctgctgttcgtcgtgttcagcgccatctatctgatcaccatggtgggcaacctgggcctggttgccctgatctacatggaacggaggctgcatacacctatgtacatttttctgggaaatctggccctgatggacagctgttgtagctgcgccatcacacccaagatgctggaaaacttcttcagcgaggacagaatcatctctctgtacgagtgcatggctcagttctacttcctgtgcctggctgaaaccgccgattgcttcctgcttgccgctatggcctacgaccggtacgtggccatttgcagccctctgcagtaccacaccatgatgagcaagaaactgtgcatccaaatgaccaccggcgcctttattgcctctaatctgcacagcatgatccacgtgggactgctgctcagactgaccttctgcagaagcaaccagatcgaccacttcttctgcgacatcctgcctctgtaccgcctgtcctgcaccgatcctagcatcaacgagctgatgatctacatcttttctatgcctatccagatctttacaatcgctacagtgctgatcagctacttgtgtatcctgtttaccatcttcaagatgaagtccaaagagggcagaggcaaggccttctcaacatgcgccagccacttcctgagcgtgtccatcttctacatctgtctgctgatgtacatccggccattcgaggaaggcgacaaggacatcccagtggccatcttctacaccatcgtgatccccctgctcaaccctttcatctatagcctgagaaacaaggaggtgatcaacgtgctgaagaagatcatgagaaactacaacatcctgaagcagacatgttcttga

SEQ ID NO: 912 - DNA, 936 bp, Artificial Sequence
  OR5L1 consensus-c
atgggcgaggaaaactgcaccacagtgaccgagttcatcctgctgggcctgtctgatgtgcccgagctgagagtgttcctgttcctgctgtttctgctgatctacggcgttaccgtgctgggcaacctgggaatgatcgccctgatccaggtgtcctctagactgcacacacctatgtacttcttcctgagccacctgagcttcgtggacttctgctacagcacaatcatcgttccaaagatgctggccaatatcctgaacaaagacaaggccatcagcttcctgggctgcatggtccagttctacctgttttgcacctgcgtggtgaccgaagtgttcctgctggccgtgatggcctacgacagattcgtggctatctgcaaccccctgctgtacatggtgaccatgagctggaagctgtgcgtcgagctggtgtcttgttgttacctgtgtggcacagtgtgcagcctgatccacctgtgcctggctctggaaatcccttcttatagatccaacgtgatcaaccacttcttttgtgatctgcctcctctgttgtccctggcctgcagcgacgtgaccgtgaacgagctgctcctgttcatcgtggccaccttcaacgagagcgtgacaatcgtgatcattctgaccagctacctgttcatcctcattaccatcctgagaatgcggtccgccgagggcagacggaaagccttcagcacctgtgccagccatcttacagccatcaccgtctttcacggaacaatcctgtttatatactgcagacctagcagcggaaatagcggcgacaccgataaggtggctaccgtgttctacacagtcgtgatccccatgctgaatcctctgatctattctctgcggaacaaggacgtgaaggaagccctgaggaaggtggtgggcagcaagatcttcagctga

SEQ ID NO: 913 - DNA, 936 bp, Artificial Sequence
  OR5L2 consensus-c
atgggcaaggaaaactgcaccaccgtgactgagttcatcctgctgggcctgagcgatgtgcctgagctgagagtgttcctgttcctgctgttcctgctgatctatggagtgaccgtgctgggcaatctgggcatgatcgccctgattcaggtgtcctctagactgcacacacctatgtacttcttcctctcccacctgagctttgtggacttctgttacagcaccatcatcgtgcccaagatgctggctaatatcctgaacaaagataaggccatcagcttcctgggatgtatggtgcagttctacctgttttgcacctgtggcgtgacagaggtgtttctgctggccgtgatggcctacgacagattcgtggctatctgcaaccccctgctgtacatggtcacaatgagccagaaactgtgtgtggaactggtgtcctgctgctacctgtgcggcaccgtttgtagcctgatccacctgtgcctggccctggaaatccccagctaccggagcaacgtgatcaaccacttcttctgcgacctgcctccactgctatctctggcatgcagcgatgtgaccgtgaacgagctgctgctgtacatcgtggctacattcaacgagatcatcaccatcgtcatcattctgacaagctacctgttcatcctgatcaccatcctgcggatgcacagcgccgagggcagacacaaggccttcagcacatgcgccagccacctgaccgccattacagtctcccacggcaccatcctctttatctattgcagaccttcttctggcaacagcggcgacaccgacaaggtggccaccgtgttttacaccgtggtgatccctatgctgaatcctctgatctacagcctccggaacaaggacgtgaaggaagccctcaggaaggtgatgggaagcaagatccattcttga

SEQ ID NO: 914 - DNA, 948 bp, Artificial Sequence
  OR5M1 consensus-c
atgtttagccctaaccataccatcgtgaccgagttcatcctgctgggcctgaccgacgaccccgtgctggaaaagatcctgttcggcgtgttcctggtgatctacctgattacactggccggaaatctgtgcatgatcctgctgatccgcaccaacagccacctgcaaacacctatgtacttcttcttgggacacctgagctttgtggacatctgctacagcagcaacatcacacccaacatgctccacaacttcctgtccgatcagaagaccatcagctacgccggctgcttcacccagtgtctgctgttcatcgccctggtgatcaccgagttctacatcctggcttctatggccctggacagatacgtggccatctgtagccctctgcactacagctctagaatgagcaagaacatttgcatctgcctggtcaccgtcccttacatgtatggcttcctgaacggcctgtcccagagcctgctgacatttcacctgtctttctgcggctctctggaaatcaaccacttctactgcgccgatcctccactgatcatgctggcctgcagcgatacaagagtgaagaaaatggccatgttcgtggtggctggatttacactgtccagcagcctgtttatcatcctgctctcttatctgttcatcttcgccgctatccttagaatccggagcgccgagggcagacacaaggccttcagcacctgtggcagccacctgacaaccgtgaccctgttctacggcaccctgttctgtatgtacctgcggccccccagcgagaagtccgttgaggaaagcaagatcatcgccgtgttctacaccttcctgtcccctatgctgaatcctctgatctactctcttcggaacaaggacgtgatcctggctatgcagcagatgattagaggcaagagctttcacaaaatcgccgtgtga

SEQ ID NO: 915 - DNA, 933 bp, Artificial Sequence
  OR5M3 consensus-c
atgctgaacttcactgatgtgaccgagttcatcctgctgggcctgacaagcagaagagagtggcaggtgctgttcttcatcatcttcctcgtggtgtacatcattaccatggtgggcaacatcggcatgatcgtgctgatcaaggtttctcctcagctgaacagccctatgtactttttcctgagccatctctccttcgtggacgtgtggttctctagcaacgtgacccctaagatgctggaaaacctgctgagcgagacaaagaccatcagctacgccggctgccttgtgcagtgcttcttctttatcgccctggtgcacgtggaaatctttatcctggctgtgatggcttttgatagatacatggctattggaaaccccctgctgtacggctccaagatgagcagagtggtgtgcatccggctgatcagctttccatacatctacggcttcctgaccagcctggccgccaccctgtggacctacggcctgtacttctgcggcaagatcgagatcaaccacttctattgtgccgacccccccctgatcaagatggcctgcgctggcaccttcgttaaggaatacaccatgatcatcctggccggaatcaatttcacatacagcctgacagtggtcatcatctcttatctgttcatcctgatcgccatcctgagaatgagaagcgccgagggcagacggaaggccttctccacatgtggcagccacctgaccgccgtgatcatcttctacggaacactgatcttcatgtacctgcggagacctaccgaggaaagcgtggaacaaggcaaaatggtcgccgtgttctacaccaccgtgatccctatgctgaatcctatgatttactccctgaggaacaaggacgtgaaagaggccatgatgaaggtgatctctcggagctgcctgacaaaatga

SEQ ID NO: 916 - DNA, 936 bp, Artificial Sequence
  OR5M8 consensus-c
atgcggagaaacttcaccagcgttaccgagttcatcctgctgggcctgacatctagactggaactgcagatcctgttcttcacactcttcctggccatctacatggtgacagtggccggcaacctgggaatgatcgtgctgatccaggtgaacgccagactgcacacaccaatgtactttttcctgtcccacctgtcctttgtggacctgtgttttagcagcaacgtgacacctaagatgctggagatcttcctgagtgaaaagaaaaccatcagctaccccgcttgcctggtgcaatgttacctgttcatcgccctggtccacgtggaaatctacatcctggctgtgatggccttcgatagatacatggctatctgcaaccctctgctctacggctctaagatgagcaagagcgtgtgcaccagcctgatcaccgtcccctacgtgtacggcgccctgacaggcctgatggaaaccatgtggacctataatctggctttctgcggccctaatgagatcaatcacttctactgcgccgatcctccactgattaagctggcctgcagcgacacctacaacaaggagctgtctatgttcgtggtggccggatggaacctcagcttcagcctgctgattatcctgattagctatctgtacatctttcctgccatcctgagaatccggagcacagagggcagacagaaggccttttctacctgtggcagccatctgaccgccgtgaccatcttctacgccaccctgttcttcatgtacctgcggcctccttctaaagagagcgtggaacagggcaagatggtcgccgtgttctacaccaccgtgatccccatgctgaaccccatgatctacagcctgcgcaacaaggacgtgaaggaggccctgatcaaagagctgtccagaaagaagtacttcagctga

SEQ ID NO: 917 - DNA, 933 bp, Artificial Sequence
  OR5M9 consensus-c
atgcctaacttcaccgacgtgacagagttcatcctgctgggcctgaccagcagacaggagctgcaagtgctgttcttcgtggtgttcctggtggtgtatatgatcaccctgctgggaaatatcggcatgattatcctgatctctatcagccctcagctgcagagccccatgtacttttttctgagccacctgtccttcgtggatgtgtggttctctagcaacgtgacccctaagatgctggaaaacctcctctccgagacaaagaccatcagctatgtgggctgtctggtccagtgctacttcttcatcgccctggtgcatgtggaagtgtacatcctggccgtgatggccttcgacagatacatggctatctgcaaccccctgctgtacggatctaagatgagccggacggtgtgcgtgcggctgatctctgtgccatacgtgtacggatttagcgtgtccctgatttgtaccctgtggacctacggcctgtacttctgcggcaacttcgagatcaaccacttctactgcgccgaccctcctctgatcaagatcgcttgtggcggcgttcacatcaaagagtacacaatgatcgtgatcgccggcatcaatttcacatacagcctgagcgtggtgctgatcagctacaccctgattgtggtcgccgtcctgcggatgagaagcgccgatggcagaagaaaggccttttcaacatgcggcagccacctcaccgccgtgacaatgttctacggcaccctgatcttcatgtacctgaggcgccccaccgaggaaagcgtggagcagggcaagatggtggccgtcttttataccacagtgatcccaatgctgaaccctatgatctacagcctgagaaacaaggacgtgaaggaagccgttaacaaagccatcaccaaggctaatctgagacagtga

SEQ ID NO: 918 - DNA, 939 bp, Artificial Sequence
  OR5M10 consensus-c
atgagcagccctaatcacaccatcgtgaccgagttcatcctcctgggactgaccgacgaccccgtgctggaaaagattctgttcggcgtgttcctggtgatctacctgatcacactggctggcaacctgtgtatgatcctgctcattagaaccaacagccacctgcagacacctatgtacttcttcctgtcccacctgtcttttgtggacatctgctactccagcaacatcacccctaacatgctgcacaacttcctgtccgatcaaaagaccatcagctacgccggatgttttacccagtgcctgctgttcatcgccctggtgatcaccgagttctacatcctggccagcatggctctggatagatacgtggccatctgtagccctctgcactacagcacccggatgtctaaaaacatctgcatctctctggttacagtcccctacatgtatggcttcctgaatggactgagccagaccttgctgaccttccacctgtctttctgcggcagcctggaaatcaaccacttctactgcgccgatcctcctctcatcatgctggcctgcagcgacaccagggtcaagaagatggccatgttcgtggtggccggctttacactgagctccagcctgtttatcatcctgctgtcttatctgtttattttcgccgctatcctgagaatccggagcgccgagggcagacacaaggccttcagcacatgcggctcacatctgacaaccgtgacaatcttctacggcaccctgttctgcatgtacctgagacctccaagcgagaagagcgtggaagagagcaagatcatcgccgtgttctacacctttctgtctccaatgctgaaccccctgatctacagcctgcggaacaaggacgtgatcctggccatgcagcagatgatcaagggcaatctgttctgtaaatga

SEQ ID NO: 919 - DNA, 966 bp, Artificial Sequence
  OR5M11 consensus-c
atgtctaataccaatggatctgctatcaccgagttcatcctgctgggcctgaccgaccggcctgagctgcaacctctgctcttcgtgctgttcctggtcgtgtacctggtgacactgctgggcaacctgggaatgatcatgctgatccggctggacagccggctgcacaccccaatgtacttcttcctgacaaatctggccttcgtggacctgtgctatacaagcaacgccacccctcagatgctgacaaacttcctgtccgagaagaaaaccatcagcttcgccggatgttttacccagtgctacatcttcatcgccctgctgctgaccgagttctacatgctcgctgctatggcctacgacagatacgtggccatctgcaaccctcttcggtatagcgtgaagatgagcagaagagtgtgcatctgtctggccacattcccctacgtgtacggcttttctgatggcctgtttcaggccattctgaccttcagactgacattttgtagaagcaacgtgatcaaccacttctactgcgccgatcctcctctgatcaagctgagctgcagcgacacctacgtgaaggaacacgccatgctgattagcgccggcttcaacctgtctagcagcctgacaatcatcctggtcagctacgccttcatcatcgccgccatcctgagaatcaaaagcgccgagggcagacataaggccttttccacctgcggctctcacatgatggctgtgaccctgttctacggcacactgttctgcatgtacgttagaccccccaccgataagaccgtggaagaaagcaagatcatcgccgtgttctacacctttgtgtcccctgtgctgaaccccctgatctacagcctgcggaacaaggacgtgaaacaggctctgaagaacgtgctgagaaggaacgtggtgaccaagatggccatgcctccattcagcaacaagtga

SEQ ID NO: 920 - DNA, 945 bp, Artificial Sequence
  OR5P2 consensus-c
atggacagcctgaaggacggcaaccacaccgccctgaccggcttcatcctgctgggcctgaccgacgaccccatcctgcgggtgattctgttcatgatcattctgtgcatctacctggttacaatctctggaaatctgggaatcattatcctgatcaggatctcaagccagctgcaccaccctatgtacttcttcctgagccacctcgcctttgccgatatggcctacagcagctctgtgacccctaacatgctggtgaacttcctggtggaaagaaataccatcagttacctgggctgcgccatccagctgggctccgccgccttcttcgccaccgtggagtgcttcctgcttgctgctatggcttacgatagattcgtggccatctgttctccactgctttatagcacaaagatgagcacacaggtgtctgtgcaactgctgctggtcgcctacatggccggatttctgatcgccgtgtcctacacaacatctttttacttcctgctgttctgtggccctaaccaggtgaaccatttcttctgcgacttcgcccctctgctggagctgagctgcagcgacatcagcgtgagcaccgttgtgctgagcttcagcagcggcagcatcatcgtggtgacaatgtgcgtgatcgctatcagctacatctacatcctgatcaccatcctgaaaatgcggagcaccgagggcagacacaaggcctttagcacctgtacctctcacctgaccgctgtgaccctgttttacggcacaatcaccttcatctacgtgatgcctaagagctcctacagcacagatcagaacaaggtggtgtccgtgttctacaccgtggtcatccccatgctgaaccccctgatctattctctgagaaacaaagagatcaagggcgccctgaagcgggaactgggcagaaagatcctgagctga

SEQ ID NO: 921 - DNA, 987 bp, Artificial Sequence
  OR5T1 consensus-c
atgagcggcctgccttctgatctggatctgtaccgcatccaactgaaaaacgtgacagaagtgaccatgttcatcctgatgggcttcactgatgatttcgaggtgcaggtgttcctgtttctgctgttcctggccatctacctgttcaccctgatcggcaatctgggactggtggtgctggtcatcggcgacagcagactgcataatccaatgtactacttcctgagcgtgctgagcttcctggacgcctgttactcttctgttgtgacacctaagatgctggtgaacttccttgctgaaaacaaaagcatcagcttcctcggctgcgccgcccagatgctgctgttcgtgacctttggaacaaccgagtgcttcctgctggctgctatggcctacgacagatacgtggccatctacaaccccctgctgtatagcgtgtccatgtctccaagagtgtacgtgcctctgatcaccgccagctacgtgggcggaatcctgcacgcctctatccacaccgtggctacattcagcctgtctttttgtgccagcaacgagatcagacacgtgttctgcgacatcccccccctgctggccattagctgcagcgacacccacacaaaccagctgttgctgttctacttcgtgggtagcatcgagatcgtgaccatcctgatcgtgctgattagctacggctttatcctgctggccatcctgagaatgcacagcgccgagggcagaagaaaggtgttctcaacatgcggctcccacctgaccggcgtctccatctatcacggcaccatcctgtttatgtacgtgcggcctagcagctcctacgccctcgaccacgacatgatcgtcagcattttctacaccatcgtgatccctatgctgaaccctatcatctacagcctgcggaacaaggacgtgaaggaagccatgaagcggctgttcggcaagaattggttcatcaacaagctgcacttctga

SEQ ID NO: 922 - DNA, 945 bp, Artificial Sequence
  OR5T2 consensus-c
atgaagaacgtgaccgaggtgaccctgttcgtgctgaagggctttacagataatctggaactgcagatcatcctgttcttcctgtttcttgctatctacctgttcaccctgatgggcaacctgggcctggtggtgctggtgatcggagatagcagactgcacaaccctatgtactacttcctgagcgtgctgtcttctgtggacgcctgctactctagcgtgatcacacctaatatgctggtcgacttcatgagcaagaacaaggtgatttcttttctgggatgtgccacccagatgttcctggctgtgacatttggcacaacagaatgcttcctgctcgctgctatggcctacgatagatacgtcgccatctacaaccccctgctgtacagcgtatccatgagccctagagtgtacgtccccctgatcatcgccagctatgttggcggcatcctgcacgccacaatccacaccgtggccaccttctcactgagcttctgcgcctccaacgagatccggcacgtgttctgcgacatccctccactgctcgccatcagctgcagcgacacccataccaaccagctgctgctgttctactttgtgggaagcatcgagatcgtgacaatcctgatcgttctgatcagctacggcttcatcctgctggccatcctcagaatgcacagcgccgagggcagaaggaaggtgttcagcacctgtggcagccacctgaccggcgtgtctatctatcacggcaccatcctgttcatgtacgtgcggcctagcagttcctacgccctggaccacgacatgatcgtgtccatcttctacaccatcgtgatccctatgctgaaccccatcatctacagcctgcggaacaaggacgtgaaggaagccatgaaaagagtgttcggcaagaatcaagtgattaacaaagtgtacttctga

SEQ ID NO: 923 - DNA, 969 bp, Artificial Sequence
  OR5T3 consensus-c
atggacaagctgagctctggcctggatatctatagaatccctctgaaaaacaagaccgaggtgacaatgttcatcctgacaggcttcaccgacgatttcgagctgcaagtgttcctgttcctgctgttcctggctatctacctgtttaccctgatcggcaatctgggcctggtcgtgctggtgatcgaggacagcagactgcataatcctatgtactacttcctgtctgtgctgagctttctggacgcctgttacagcaccgtggtcacccctaagatgctggtgaacttcctggctgaaaacaaaagcatctcttttatcggatgtgccacccagatgctgctgttcgtgaccttcggcaccaccgagtgcttcctgcttgccgccatggcctacgacagatacgtggccatctacaaccctctgctgtacagcgtgtccatgagccctagagtgtacgttcctctgatcaccgcctcttacgtggcaggcatcctgcacgccacaatccacaccgtggctacattcagcctgagtttttgcggcagcaacgagatccggcacgtgttctgcgacatcccccccctgctggccatctcctgcagcgacacccacacaaaccagctgctgctcttctacttcgtgggatctatcgaaatcgtgacaatcctgattgtgctgatctcctacggatttatcctgctggccattctgaagatgcacagcgccgagggcagacagaaggtgttcagcacatgcggcagccacctgaccggcgtgacaatttaccacggcaccatcctcttctcctacatgcgccccagcagcagctacgccagcgatcacgatatgatcgtgtctatcttctacaccatcgtgatccctatgctgaacccaatcatctatagcctgcggaacaaggacgtgaaggaagccatgaaaaagctgctcaagctggtctacaagtga

SEQ ID NO: 924 - DNA, 942 bp, Artificial Sequence
  OR6M1 consensus-c
atgggcaaccagagcaccgtgaccgagttcaccctgaccgctttccccgccctgctggagctgcagatcagcctgttcgtggtcctgcttctgacctacaccctgacagctacaggaaatatcgtgatcatcagcctgatctggatcgacaaccggctgcagacccctatgtacttcttcctgtctaatctgtcctttctggatatcctgtacacaacagtggtgacgcccaagctgctcgcctgcctgctgggagaaaagaagaccatttctttcgccggctgcatcacacagacatatttctactttttcctgggcaccgtggagttcatcctgctggctgtgatgagcttcgacagatacgtggctatctgcaacccactgcggtacaccatcatcatgaacagccgggcctgcctgctgctggtgctgggctgttgggtgggcgccttcctgtctgtgctgtgtcctacaattgtggtttccagacttccttactgcagaaaggaaatcaaccacttcttttgcgacatcgcccctctgctgcaagtggcctgtatcgacacccactttatcgagatgattaatttcctgctgagcagcctggtcctgctgaccagcctggtgttcaccacagtgtcctacacctacatcatctccaccatcctgaggatccctagcgcccagggcagacagaaagccttcagcacctgcgcctctcatatcaccgtggtgtctatcgcctatggcagcaacatcttcatgtacgttagacctagccagagccacagcctcgattttgacaaggtgactgccgtgctgacaacagtcgtgacccctctgctgaaccccttcatctacagcctgcggaacgagaaggtgaaggaagtgctgagagaggccgtgaacagaatcatgagcctgatccagagaaaaacctga

SEQ ID NO: 925 - DNA, 939 bp, Artificial Sequence
  OR6N1 consensus-c
atggataccggcaactggtcccaggtgacagagttcatcatcctcggatttccccacctgcagggcgtgcagatctacctgttcctgctgctgctgctgatctacctgaccaccatcctgggaaatctgctgatcttcctggtggtctgcctggatagcagactgcatacccctatgtaccacttcgtgtccatcctcagcttcagcgagctgggctacaccgccgctacaatccctaagatgctggccaacctgctgagcgagaagaaaaccatcagcttctctggctgtctgctgcaaatctatttcttccacagcctgggcgccaccgagtgctacttgctgacagccatggcctacgaccggtacctggccatatgtagacctctgcactaccctaccctgatgacccctacactgtgcgccgagatcgccatcggctgctggctgggcggactggctggccccgtggtggaaatcagcctgatctccagactgcctttctgcggccctaaccggatccagcacatcttttgcgacttcccacctgtgctgtctctggcctgcaccgacaccagcatcaacgtgctcgtggacttcgtgatcaacagctgtaaaatcctggctacattcctgctgatcctgtgcagctacgtgcagattatctgtaccgtgctgagaatccccagcgccgccggcaagcggaaggctttcagcacctgcgcctctcacctgacagtggtgctgattttctacggcagcatcctgtttatgtacgtgcggctgaagaagtcttacagcctggactacgatagagccctggcagttgtctacagcgtgctgactccattccttaatccctttatctattctctgcgcaacaaggagatcaaggaagccatgagaagacagctgaagagaatcggcatcctcgcctga

SEQ ID NO: 926 - DNA, 954 bp, Artificial Sequence
  OR6P1 consensus-c
atgcggaacctgtctggcggccatgtggaagagttcgtgctggtcggcttccccaccagcccccccctgcagctgctgctgttcgtgctgttcctggcaatctatctgctgacactgctggagaacgccctgatcgtgtctacaatctggctgacccctagcctgcacagacctatgtattttttcctgggccacctgagcttcctggaactgtggtacatcaacgtgaccgttcctcggctgctgggcgccttcctcacacaggacggcagagtgtcctacgtgggatgtatgacccaactgtacttcttcatcgccctggcctgcaccgagtgcgtgctgctggccgtgatggcctacgatagatacctggccatctgcgagccactgcggtaccccagcctgatgccttcctccctggctacaagactggccgctgctagctggggctctggatttttcagcagcatgatgaaactgctgtttatctctaggctgagctactgtggccctaacatcatcaatcacttcttctgcgacatcagccctctgctgaatctgacatgcagcgataaggaacaggccgagctggtggacttccttctcgcactggtgatgatcctgctgcctctgctggctgtggtgtccagctacgccgccatcatcgccgccattctgcggatccctacagcccagggaagacacaaggcctttagcacctgtgccagccacctggccgtggtcgtgatctactacagctctaccctgttcacctacgccagacctagagccatgtacaccttcaaccacaacaagatcattagcgtgctgtacaccgtcatcgtgccattcctgaaccccgccatctactgcctgagaaacaaagaggtgaaggacgccctgagaaagaccgtgctgggcagatgccactaccctcgggacgtgccagattga

SEQ ID NO: 927 - DNA, 954 bp, Artificial Sequence
  OR6Q1 consensus-c
atgcagccttacaccaaaaactggacacaggtgacagagttcgtgatggtcggctttgccggcgtgcacgaggccagactgctgttcttcatcctgtttctgacaatgtacctgtttaccctggtcgagaacctggccatcatcctggtggtgggcctggatcacagactgagacggcctatgtacttcttcttgacccacctgtcttgtctggaaatctggtacaccagcgtgacagtgcccaagatgctggccggattcatcggagtggacggcggcaagaatatcagctacgccggctgcctgagccaactgttcattttcaccttcctgggcgccaccgagtgtttcctgctggctgctatggcctacgacagatatgtggccatttgcatgcctctgcggtatggcgctctggtcagctggggcacctgcatcagactggctgccgcctgctggctggtgggcttcctgacgcccatccttcctatctacctgatgagccagctgaccttttgcggccctaacgtgatcgaccatttcttctgcgacgcctctccactgctggcgctcagctgttctgatgtgacactgaaggaaaccgtggacttcctggtgagcctggccgtgctgctggccagcagcatggtgatcgccgtgtcctacggcaacatcgtgtggaccctgctgcacatccgcagcgccgctgaacggagaaaggcctttagcacatgcgccgcccacctgaccgttgtgtccctgttctacggcaccctgttcttcatgtacgtgcggaccaaggtggccagctctatcaacttcaacaaggtggtgtccgttttctactctatcgtgacacctatgctgaaccccctgatctacagcctgagaaacaaagaggtgaagggagctctgggaagagccttcagcctcaatagctggaagggccagtga

SEQ ID NO: 928 - DNA, 954 bp, Artificial Sequence
  OR6T1 consensus-c
atgaaccccgagaactggacccaagtgacctctttcgtgctgctgggatttccaagctctcacctgctgcagttcctcctgttcctgggcctgatggtgacatacatcgtcacagccacgggcaacctgctgatcatcgtgctgagctggatcgacagaaggctgcacacccagatgtacttcttcctgagaaatctgagctttctggaactgctactggtgtccgtggtggtgcccaagatgctggtggtgatcctgaccggcgatcacacaatcagcttcgccagctgtatcattcagtcctacctgtatttcctgctgggcaccaccgacttcttcctgttagctgtgatgagcctggatagatacctggccatctgcagacctctgcactacgagacactgatgtccggccacgtgtgctcccagctggtcctggcaagctggctggctggcttcctgtgggttttgtgcccaacaattctgatggcctctctgcctttctgcggacctaacggcatcgatcatttcttctgcgacagctggcctctgctgagactgagctgtggcgacacccacctgctggagctggtggccttcgtgctgagcaccagcgtgctgctgggaagcctggctctgacatctgtcagctacgcctgcatcctggccaccgtgctgcgcgcccctaccgccgctgaaagacggaaggcctttagcacatgcgccagccacctgaccgtggtggtgatcgtgtacggcagcagcatcttcctgtacatcagaatgtccgaggcccagagcaagctgctgaacaagggcgccagcgtgctgtcttgtatcatcacccctctgcttaatccctttatcttttctctgcggaacgacaaggtgaaacaggccctgcgggacgccctgagatggcacagactgaccgccgtgcggaaactgagttga

SEQ ID NO: 929 - DNA, 939 bp, Artificial Sequence
  OR6X1 consensus-c
atgcggaacggcaccgttatcacagagttcattctgctcggatttccagtgatccagggcctgcagacacccctgttcatcgtgatcttcctgatctacatcctgaccctggccggcaatggcctgatcatcgccatcgtgtgggccgagcctagactgcagatccccatgtacttcttcctgtgcaacctgagcttcctggagatttggtacaccaccaccgtgattcccaagctgctggaaaccttcgtggtggccagaaccgtgatctgcatgtcctgctgtctgctgcaggccttcttccacttcttcctgggaacaaccgagttcttcatcctgacaatcatgtctttcgacagatacctggctatctgtaaacctctccactaccctacgatcatgacatctaagctgtgcctgcaactggccctgtccagctgggtcgtcggcttcaccatcgtgttctgccagaccatgctgcttatccagctgcctttttgcggcaacaacgtgatcaaccacttctactgcgatgtgggccctatcctgaaggccgcttgtatcgacacaagcatcctggaactgctgggactgctggccacaatcctggtgatccccggcagcctcctgttcaccatgatcagctacatttacatcctgagcacaatcctgcgcatccctagcgccaccggcagacagaaagctttcagcacctgcgccagccacctgaccgtggtgtctctgctgtacggcgccgtgctgtttatgtatctgcggcctaccgcccacagcagctttaagatcaacaaagtggtgtccgtgctgaacaccatcctgacaccactgctgaatccttttatctataccattagaaacaaggaagtgaagggcgctctgcggaaggccatgacctgtcctaagaccggccatgccaagtga

SEQ ID NO: 930 - DNA, 930 bp, Artificial Sequence
  OR8B4 consensus-c
atgaccctgcggaacagcagctccgtgaccgagttcatcctggtgggactgagcgaacagcctgagctgcagctccctctgtttctgctattcctgggcatctacgtgtttacagtggttggcaacctgggactgattacactgatcggcctgaacagcagcctgcacacccctatgtacttcttcctgtttaacctgtccttcatcgatctgtgctactcctgcgtgttcaccccaaagatgctgaacgacttcgtgtctgagaacatcatcagctatgtgggatgtatgacacagctgttttttttctgcttcttcgtgaacagcgaatgctacgtgctggtcagcatggcctacgacagatacgtcgccatctgcaaccccctgctgtacacagtgacaatgtctcctcaggtgtgcagcctgctgatgttcggctcctacgtgattggatttgccggcgccatggctcacacaggcagcatgctgagactgaccttctgcgatagcaacatcatcgaccactacctgtgtgaagtgctgccactgctgcaactgtcttgtacctctacacatgtgaacgagctggtgttcttcatcgtagttggcgtggtgatcaccctgagcagcatctctatcttcatctcttatgccctgatcttgagcaatatcctgcggatccccagcgccgagggcagaagcaaggccttcagcacctgcggcagccacatcatcgccgtggccctgttcttcggcagcggcgctttcacctacctgaccaccagcttccccggcagcatgaaccagggcaaattcgctagcgtgttctacaccaacgtggtgcctatgctgaaccctctgatctacagcctgaggaacaaggacgtgaagctggccctgggcaagacccttaaaagagtgctgttctga

SEQ ID NO: 931 - DNA, 942 bp, Artificial Sequence
  OR8B8 consensus-c
atgaaaatggccgccgagaacagctctttcctgaccgagttcatcctggccggcctgactgatcaacctggcgtgcagatccccctattcttcctgttcctgggattttacgttgtcaccgtggttggcaatctgggcctgatcacactgattggactgaacagccacctgcatacacctatgtacttcttcctgtacaacctgagctttattgatttctgttacagcagcgtgatcacccctaagatgctgatgagctttgtgtctaagaagaactctatcagctatgctggatgtatgacccagctgttcttctttctgttcttcgtggtgtccgagagcttcatcctgtccgccatggcctacgacagatacgtggccatctgcaaccctctgctgtatacagtgaccatgagcccacaggtgtgcctgctcctcctgctgggcgtgtacggcatgggcttcgccggcgccatggcccacaccgcctgtatgatgggagtgacattctgcgccaacaacctggtgaaccactacatgtgcgacatcctgcctctgctggaaagagcctgcaccagcacatacgtgaatgagctggtggtctttgtggtcgtgggcatcgacatcggcgtgcccaccgtgacaatcttcatcagctacgctctgatcctgagctctatcctgcacatccggagcaccgaaggcagatccaaggcctttagcacctgcagcagccacatcatcgccgtgtccctgttcttcggcagcggcgctttcatgtacctgaagcccagcagcatccttcctatgaaccagggcaaagtgagctccctgttctacaccaccgtggtgcctatgctgaatcccctgatctactctctgcggaacaaggacgtgaaggtggccctgaaaaagatcctgaacaagaacgctttctcttga

SEQ ID NO: 932 - DNA, 933 bp, Artificial Sequence
  OR8B12 consensus-c
atggctgccaagaacagctctgtgaccgagttcatcctggccggcctgaccgatcagcctggcctgcagatccccctgttcttcctgtttctgggattctacatggtgacagtggtgggcaacctgggcctcattacactgattggactgaacagccacctgcatacacctatgtacttcttcctgtttaacctgagcctgatcgacttctgttacagcaccaccatcacccctaagatgctgatgagctttgtgtccaaaaagaacatcatcctgcacaccggctgcatgacccagctgttcttcttttgttttttcgtgatcagcgagagcttcatcctgtccgccatggcctacgacagatacgtggccatctgcaagccactggtctacacagtgaccatgtctcctcaggtgtgcctgctgctgctgctgggcgtgtacgtgatgggcttctccggcgccatggcccacacaggctccatcatgtctctgaccttctgcgccgataacctggttaatcacttcatgtgcgacatcctgcctctgctggaactgagctgcaacagcacatacgtgaacgagctggtggtgttcatcgtggtcgctatcgatatcggcatgcctatcgtgaccattttcatcagctacgccctgatcctgagcagcatcctccacatccacagcacagagggcagaagcaaggccttcagcacctgtagcagccacatcatcgtggtcagcctgttcttcggcagcggcgctttcatgtatctgaagccccccagcatccttcctctggaccaaggaaaagtgtcttctctgttttacaccatcgtggtgccaatgctgaaccccctgatctacagcctgcggaacaaggacgtgaaggtggccctgcggaagaccctgggaagaaaaatcttctcttga

SEQ ID NO: 933 - DNA, 927 bp, Artificial Sequence
  OR8D1 consensus-c
atgaccatgggcaaccacagcaccgccgctcagttcgtgctcgtgggactgacccagcagcctgagctgcaactgcctctgttcctgctgttcttgggcatctacgtggtgacagtggtgggcaatctgggcatgatcctgctgatcgccgttagccccctgctgcacacacctatgtactacttcctgagcagcctgagcttcgtggatctgtgctacagcagcgtcattactcctaagatgctggtgaacttcctgggcaagaagaacacaatcctgtacagtgagtgtatggcccagctgttcttcttcgtggttttcgtggtggcagaaggatatctgctgacagccatggcctacgaccggtacgtcgctatctgcagccctctgctgtacaacgtgatcatgagctctagagtgtgcagcctgctggtgctggtggcctttattctgggcttcctgtccgccctggcccacaccagcgccatgatgaaactgtctttttgcaagagccatatcatcagccactacttctgcgacgtgctgcctctgctgaacctgtcctgctctaatacccacctgaatgagctgctgctcttcatcatcgccggctttaacaccctggtccccaccctggccgtggctatcagctacgccttcatcttctactctatcctccacatccggagctctgaaggcagatctaaggcctttggaacatgttccagccacctgatggctgtgggcatcttcttcggcagcatcaccttcatgtactttaagcctccaagcagcaacagcctggaacaggagaaggtgtccagcgtgttctacaccaccgtgatccccatgctcaaccccctgatctattctctgagaaacaaggacgtgaagaaagccctgagaaaggtgctggtgggcaaatga

SEQ ID NO: 934 - DNA, 936 bp, Artificial Sequence
  OR8G1 consensus-c
atggccggcggaaatcactctaccgtgaccgagttcatcctggcaggcctgaccgagcagccagaactgcagctgcccctgttcctgctgttcctgggcatctacgtcgtgaccgtggtgggcaatctgggaatgatcactctgatcggcctgagctcccacctgcacacccctatgtactactttctgagctcgcttagcttcatcgacctgtgccacagcacagtgatcacacctaagatgctggtcaacttcgtgacagaaaagaacatcatcagctaccctgagtgcatgacccagctgtacttcttcctggtgttcgccatcagcgagtgtcacatgctggccgccatggcctacgacagatacgtggctatctgcagccctctgctgtacaacgtgatcatgagccaccaggcctgcttcagcctgatcctgggagtttatattatcggcctggtgtgcgcctctgcccacacaggctgcatgttcagagtgcatttctgtaaattcgacgtgatcaaccactacttctgcgacctgctccccctgcttaaactgagctgcagctccacatacgtgaacgagctgctgatcctgtgttttggcgcctttaacatcctggttccatctctgaccatcctgtcctcttatatcttcatcatcgccagcatcctgcggatcagaagcaccgagggcagatctaaggccttcagcacctgtagcagccacatcctggccgtggctatttttttcggcagcgccgcttttatgtacctgcaacctagctccgtgtccagcatggatcagggcaaggtgtctagcgtgttctacaccatcattgtgcctatgctgaaccccctgatctacagcctgcggaacaaggatgtgcacgtggccctgaagaagatgctggaacggagaaccttcctgtga

SEQ ID NO: 935 - DNA, 936 bp, Artificial Sequence
  OR8G5 consensus-c
atggccgccggaaaccacagcaccgtgaccgagttcatcctggctggcctgaccgaaaaacccgagctgcaactgccactgttctttctgttcctcggaatctacgtggtgacagtggtgggcaatctgggaatgatcaccctgatcggcctgagcagccacctgcacacccctatgtactacttcctgtcctctctgagcttcatcgacctgtgccacagtaccgtgatcacacccaagatgctggtcaacttcgtgaccgagaaaaacatcattagctatcctgagtgcatgacccagctgtacttcttcctggtgttcgccatcgccgagtgttatatgctggccgctatggcctacgataggtacgttgccatctgctctcctctgctgtacaacgtgatcatgtcccaccaggcttgcttcagcctgatcctgggcgtctacatcatcggcctcgtttgtgccagcgcccacacaggctgtatgttcagagtgcacttctgcaagtttgatgtgatcaatcactacttttgcgacctgctaagcctgctgaagctgtcttgcagctccacatacgtgaacgagctgctgatcctggtgttcagcggcatcaacattctggccccttctctgaccatcctgagcagctacatcttcatcattgcctccatcctgagaatcagaagcacagaaggcagatctaaggccttttcaacatgcagcagccatatcagcgccgtcgccgtgtttttcggcagcgccgctttcatgtacctgcagcctagcagcgtgtctagcatggaccagggcaaggtgagcagcgtgttctacaccatcgtggtgcctatgctgaaccccctgatctactctctgcggaacaaagacgtgaacgtggccctgaagaagatgctggaaaagcggatcttcctgtga

SEQ ID NO: 936 - DNA, 945 bp, Artificial Sequence
  OR8H2 consensus-d
atgggcagacggaacaacaccaacgtggccgacttcatcctgatgggcctgaccgacagtgaagagatccagctggtgctgttcatgctgttcctgctcatctacctgatcaccgtgctgggcaacgtgggcatgatcctgattattcggctggacctgcagctgcacacccctatgtactttttcctgtctcacctgagctttctggatctgagctacagcacagttattacacctaagaccctggagaatctcctgacctctaccaagtacatcagcttcacgggatgttttacccagatgtacttcttcgtgttcctgggcgctacagagtgcttcctgctgagcagcatggcctacgatagatacgtggccatctgcaatccactgcattaccctgtggtgatgagcaagagactgtgctgcgccctgatcaccggatcttatgtgatcggatttatcgactccttcgtcaacgtgctgtgtatgagcaggctgcacttctgcgacagcaacgtcatccaccacttcttctgcgataccagccctatcctcgccctgtcctgcacagacacatacgacaccgagatcatgatcttcatcatcgccggcagcacactgatggtgtccctgatcacaatcagcgtgtcttacgtgtctatcctgtctacaatcctgaagatcaacagcaccagcggcaagcagaaggccttcagcacctgtgccagccacctgctgggcgtgacaatcttttacggcaccatgatcttcacctacctgaagcctagaaagtcctatagcctgggcaaagaccaagtggctagcgtgttctacaccatcgtgatccccatgctgaaccccctgatctacagccttagaaataaggaagttaagaacgccctgatcagagtgatgcagaaacgggaagatagcagactgaaatga

SEQ ID NO: 937 - DNA, 933 bp, Artificial Sequence
  OR8I2 consensus-c
atggccggcaacaacttcacagaggtgaccgtctttatcctgtctggcttcgccaaccaccccgagctgcaggtgtccctgttcctgatgttcctgttcatctacctgttcaccgtgctgggcaatctgggcctgatcatgctgatccggatcgacagccagctgcacacaccaatgtacttcttcctgagcaacctggctttcatcgacatcttctattctagcaccgtgacacctaaggcccttgtgaacttccagtctaaccagaagaccatcagcttcgtgggctgttttgtgcagatgtacttcttcgtcggactggtgtgcagtgaatgcttcctgctgggaagcatggcctacgatagatacgttgctatctgcaatcctctgctgtactccgtggtgatgagccaaaaagtgtgtaattggctgggcgtgatgccttacgtgattggattcaccaacagcctcatcagcgtgtgcgtgatctcttccctggccttctgcgatagcagcatcaaccatttcttttgcgacaccaccgccctgctggccctgagctgcgtggacgccttcagcaccgaaatggtgatcttcgtgctggctggctttaccctgctgtcgtccctcctgatcatcacagtcacctacatcgccatcatcagcgccatcctgagaatccagagcgccgctggcagacagaaagccttcagcacatgtgccagccacctgatgggcgtgaccatcttctacggcagcctgatctttacatatctgcaacctgataacaccagctctcttacacaggcccaggtggcttctgtgttctacaccatcgtgattcccatgctgaaccccctgatctacagcctgcggaacaaggacgtgaagaacgccctgctgagagtgatccacaggaagctgtttccttga

SEQ ID NO: 938 - DNA, 948 bp, Artificial Sequence
  OR8J1 consensus-c
atggcccctgaaaacttcaccagagtgaccgagttcatcctgaccggcgtgtccgattgcccagaactgcaaatccctctgttcctggtgttcctggtgatctacggcctgacagtggccggcaatctgggcatcatcaccctgaccagcgtggacagcagactccagacccctatgtacttcttcctgcgccacctggccatcattaacctgggcaacagcaccgtgatcgccccaaagatgctgatcaacttcctggtcaagaagaaaaccacatcttactacgagtgcgccacccagctgggaggcttcctcgtgtttatcgtggccgaggtgatcatgctggccgtgatggcctacgatagatacgtggctatttgtaatcctctgctgtacatggtggtggtgtcccggcggctgtgtctgctgctggtgtccctgacctacctgtatagcttcagcacagccatcgtggttagcagcagcgtcttttccgtgtcttattgtagcagcaacgtgatcaaccacttctactgcgacaacgtgcccctgctcgccctgagctgcagcgatacatacttccctgagacagtggtctttatcagcgccgccacaaacctggtgggaagcctgatcatcgtgctggtcagctactttaacatcgtgctgagcatcctgagaatccggagcagtgaaggcagaaagaaagccttctctacatgcgccagccacatgatggctgttacagtgttctacggcaccctgctgttcatgtacctgcagcctagatctaatcattctctggacaccgacaagatggcttctgtgttctacaccctggtgatccccatgctgaaccccatgatctacagcctgcggaacaaggacgtgaaggccgctctgcagagattcctcaccaacctgtgctacagctttaagaccatgtga

SEQ ID NO: 939 - DNA, 951 bp, Artificial Sequence
  OR8K1 consensus-c
atggaaaagcacaaccacaccgccgtgacaaaggtgaccgagttcatcctgatgggcatcacagacaacccaggcctgcaggcccctctgttcggcatcttcctgattatctacctggtgaccgtgatcggaaatctgggaatggtgatcctgacccaccttgatagcaagctgcacacacctatgtacttcttcctgcggcacctgagcatcaccgatctgggctacagcaccgtgatcggccctaagatgatggtcaatttcgtggtccacaagaacaccattagctacaactggtgcgccacacagctggcttttttcgagatctttatcatcacggagctgtttatcctgtccgccatggcctacgacagatacgtggctatctgtaaacctctgctgtacgtggttatcatggccgagaaagtgctgtgggtgctggtgctggtcccctacctgtactctacatttgtgtctctgtttctgaccatcaagctgttcaagctgtcgttctgcggctctaatatcatctcttatttctactgcgattgcctgcctctgatctccatcctgtgcagcgacacccacgagctggaactgatcatcctgatcttcagcggctgtaacctgctgtctagcctgctgatcgtgctggtgtcctacatgttcatcctcgtggccatcctgagaatgaacagccgggaaggcagatacaaggccttcagcacctgtagcagccacctgaccgtggttgtggtgttctacggcaccctcctcttcatctacctgcagcctaaaagcagccatacattcgccatcgacaagatggctagcgtgttctacaccctggtgattcctatgctgaaccccctgatctatagcctgagaaacaaggaggtgaaggacgccctgaagcggaccctgacaaacagatgcaagatccccacctga

SEQ ID NO: 940 - DNA, 942 bp, Artificial Sequence
  OR8K3 consensus-c
atggaaaagcacaacctgacagtgctgaacgagttcatcctgatgggcatcaccgatagaccagagctgcaagcccctctgtttggcctgttcctgatcatctacgtgatcagcgtggtgggcaacctgggcatgatcatcctgaccaaggtcgactctaggctgcagacacctatgtatttcttcctgcggcacctggccttcaccgacctgggctacagcaccactgtgggacctaagatgctagtgaacttcgtggtcgaccagaacacaatctcttactacttctgcgccacacagctggcttttttcctggtctttataggatctgaactgttcatcctgtctgccatgagctacgacagatacgtggctatctgcaatcctctgctgtacaccgtgatcatgagccagcgggtgtgccaggtgctggtggccatcccctacctgtacagcacattcgtgtccctgctcgtgaccatcaagatctttacactgtccttctgcggctacaacgtgatctctcatttctactgcgacagcctgcctttgctgagcctgctgtgcagcaacacccacgagatcgagctgatcatcctgatcctggccgcttttgatctgatctccagcctgctgatcgtgctggtttcttatctgctgatcctggtggccatcctgagaatgaactccgccgaaggcagacagaaagccttcagcacctgtggcagccacctgaccgtggtgatcgtgttctacggcaccctgatcttcatgtacgtgcagcctaaaagcagccacagcttcgacacagataaggtggccagcatcttctacaccctggtgattcccatgctcaatcccctgatctacagcctgcggaacaaggacgtgaagtacgccctgcagagaacctggaagaagctgtgtaatattttcagctga

SEQ ID NO: 941 - DNA, 933 bp, Artificial Sequence
  OR8K5 consensus-c
atgggccagcaaaatctgaccgtgctgaccgagttcatcctgatgggagtgaccagacgccccgagctgcagctgcctctgttcggcgtgttcctgatcatctacctaatcaccgtggttggcaacctgggcatgatcattctcacaaagctggatagcagactgcacactcctatgtacttcttcatcagacacctggctttcatcgacctgggcaacagcaccgtcatctgccctaagatgcttgtgaacttcgtggtggaccagaacacaatcagctactacgcctgcgccacacagctggccttcttcctgatgttcatcatcagtgagttcttcatcctgagcgctatggcctacgacagatacgtggccatctgcaacccactgctctacaacgtgatcatgagccagcggctgtgccacgtgctggtgggcatcccttacctgtacagcacatttcaggccctgatgttcaccatcaagatctttaccctgacattctgcggctctaatgtgatcagccatttctactgcgacgacgtgcctctgctgccaatgctgtgcagcaatgcccaggagatcgagctgctgattatcctgttttccgccttcaacctgatctctagcctgctggtcgtcctggtgtcctacatgctgatcctgctggccatcttccggatgcacagcgccgagggcagaaagaaagccttcagcacctgtggaagccacctgaccgtggtggtggtgttctacggcagcctgctgttcatgtacatgcagcctaagtccacccactcttttgatacagataagatggcttctgtgttctacaccctggtgattcccatgctgaaccccctgatctatagcctgcggaacaaggaagtgaagaacgccttttatagagtgttttgtaaactgtgtatctga

SEQ ID NO: 942 - DNA, 960 bp, Artificial Sequence
  OR8U1 consensus-c
atggcccagattaactgcacccaggtgaaagagttcatcctggtcggcctgacagatcagcaggagctgaagatgcctctcttcgtgctgttcctgtctatctacctgttcaccgttgtgggcaacctgggcctgatcctggtgatccggaccgatagcagactgaacacccctatgtacttcttcctgagcaacctggcttttgtggacttctgctacgccagcgtgattacacctaagatgctgggaaatttcctgtacaagcagaacgtgatcagcttcaacgcctgtgccgctcaactgggatgttttctgaccttcatggtctctgaatgcctgctgctggcctccatggcctacgacagatacgtggcgatttgtaatcctctgctttacatggtggtgatgagccccggcatctgcatccagctggttgctgtgccatacagctattcttttctgatggccctgtttcacaccatcctgaccttcagactgtcttattgccactccaacatcatcaatcacttctactgcgacgacatgcccctcctgaggctgacatgcagcgacacacactcaaagcaactgtggatctttgcctgtgccggcatcacctttatcagcagcgtgctgatcgtgttcgtgtcctacatgttcatcatctccgccatcctgcggatgagaagcgccgagggcagacagaaggccttcagcacatgcggctctcatatgctggccgtgaccatcttctacggcacactgatcttcatgtacctgcagccttctagcagccacagcctggacaccgataagatggctagcgtgttctacaccgtgatcatccccatgcttaaccctctgatctacagcctgcggaacaaggacgtgaaggaagccctgaagaagatcatcatcaacaagaaccaggccagcggcttcctgaaattcaagaaatga

SEQ ID NO: 943 - DNA, 918 bp, Artificial Sequence
  OR9G1 consensus-c
atggaacggtctaaccacaccgtgacagagttcatcctgctgggcttcaccacagaccccgtgatgcaactggtgctgttcgtggtctttctgggagtgtactctctgacagtggtgggcaatagcaccctgatcgtgctgatctgcaacgacagcagactgcacacccctatgtacttcttcatcggcaacctgagctttctggacctgtggtactccagcgtgtacacccccaagatcctggtgacctgcatctctgaagataagtccatcagcttcgccggatgtgtgtgtcagttcttctttagcgccggcttggcttactctgagtgctacctgctcgccgctatggcctacgacagatacatggccatcagcaagcctctgctctattcacaggccatgagcatcaagctgtgcgcctttctggtcgccgtctcttacctgggaggctttattaacagcagcatcatcaccaagcggacattcagcctgaacttctgcagagataacgtgatcgacgacttcttctgcgacctgctgcctctggttaagctggcatgcggcagaaaggacggctaccagatcatgctgtatttcctgctggcctccaacgtgatcaccccagctgtgctgatcctggcttcttatctgttcattatcgccacaatcctgagaatccggagcacacagggccgcctgaaggccttcagcacctgttctagccacctgaccagcgtgaccctgtactacggcagcatcctgtacatctacgccagacctagaagcagctacagcctggatatggacaagatcgtgtccaccttctacacagtggtgttccccatgctgaatcctatgatctacagcctgcggaacaaagatgtgaaagaggccctgaacaagctgctgaaatga

SEQ ID NO: 944 - DNA, 939 bp, Artificial Sequence
  OR9G4 consensus-c
atggaagtgggaaatcggaccatcctgacagagttcatcctgctgggcttcagcgccgatcctcagtggcagctgatcctgttcggcatcttcctgatgctgtacctgattactctgagcggcaacatgaccctggtgatcctgatcagaatcgacagccgcctgcatacacctatgtacttcttcatcggcaacctgtcttttctggacttctggtacacatccgtgtacacccctaagatcctggccagctgcgtgtccgaggataaaagaattagcctggctggctgcggcgcccagctattcttttcttgtgtggtggcttataccgagtgctacctgctggctgctatggcctacgacaggcacgccgctatctgcaacccactgctctacagcggcaccatgagcacatctctttgtaccggcctggtcgccggatcctacatcggaggctttctgaacgccatcgcccacacagccaacaccttccggctgagcttctgtggcaagaacatcattgatcacttcttctgcgacgcccctcctctggttaagatgagctgcaccgacaccagagtgtacgagaaggtgctgctgggcgtggtcggcttcaccgtgctgagcagcatcctggccatcctgatctcttatttcaacatcctgctggccatcctcagaatccggagcgcctctggcagaagaaaggccttcagcacctgcgccagccacctgatcagcgtgatgctgttctacggcagcctgctgttcatgtacagcagaccttctagcacctactccctggaacgggacaaggtggccgccctgttttacacagtggtgaaccccctgcttaatcccctgatctacagcctgcggaacaaggacgtgaaggaagcctttagaaaagccacccagaccatcagaccccaaacatga

SEQ ID NO: 945 - DNA, 945 bp, Artificial Sequence
  OR9I1 consensus-c
atggccaagaacaacctgaccacagtgaccgagttcatcctgatgggcttcactgatcaccccaagctggaaatccctctgttcctggtgttcctgagcttctacctggtgaccctgctgggcaatgtgggcatgatcatcctgatccaggtggacgtgcagctgcacacccctatgtacttcttcctgagccatctgagcctgctggacgcctgctacacaagcgtgataacacctcagatcctggcaaccctggccaccggcaagaccgtgattagctacggccactgcgccgcccagttctttttcttcaccatctgcgccggcacagagtgcttcctgctggctgtgatggcctacgacagatacgtggccatcagcaaccctctgctgtacaccgtggccatgaacccacggctgtgctggtccctggtggtgggagcttatgtgtgcggcgtgtccggcgccatcctgagaacaacatgcaccttcaccctgtccttttgcgacgacaatcaaatcaacttcttcttttgtgacctgcctcctctgcttaaactggcttgttctgataccaccaacatcgagatcgtgatcgtgttcttcggaaatttcgtgatcctggccaacgccctggtcatcctcatcagctatctgctcatcattaaggccatcctgcgggtgaagagcagcggaggcagagccaagacatttagcacctgtgccagccacctcaccgccgtggctctgtttttcggcaccctgatcttcatgtacctgcggagcggcagcggcaaatctctggaggaagataaagtggtcagcgtgttctacaccgtggtgatccccatgctgaaccccctgatctactctctgaggaacaaggacgtcaaggccgcttttagaaaggtgacaggcagactgcaggtttctctgagtatgtga

SEQ ID NO: 946 - DNA, 948 bp, Artificial Sequence
  OR11H12 consensus-c
atgaacgtgtccgagcctaattctagctttgcctttgtgcgggagttcatcctgctgggcttcagctgcgagtggaagatccagatcctgctgttcagcctgttcaccaccacatacgccctgacaatcaccggcaacggcgccatcgtgtgcgccctgtggtgcgaccaaagactgcatacccctatgtacatctttcttggaaatttcagcttcctggaaatctggtatgtgtccagcaccgtgccaaagatgctggtgaacttcctcagcgagaagaaaaccatcagcttcgctggctgcttcctccagttctacttcttcttctctctgggaacaagcgagtgcttcctgctggctgtgatggccttcgacagatacctggccatctgcagacctctgcactaccctaacatcatgaccggtcacctgtgcaccaagctggtcatcatttgttgggtgtgtggctttctgtggttcctgatccccatcgtgctgatttctcagatgcccttctgcggccccaacatcatcgaccacgtggtgtgtgatcctggccctctgttcgccctggcatgcgtgtctgctcctagaacccagctgctctgttacacactgagcagcctggttatcttcggcaacttcctgtttatcctgggctcctataccctggtgctgctggccgtcctgcggatgcctagcgccaccggcagacacaaggccttcagcacatgcggcagccacctggctgtggtgtccctgttctacggctcactgatggtgatgtacgtgtctcctggactgggccacagcgccggcatgcagaaagtggccacactgttttacgccatggtcaccccactgttcaaccccctgatctacagcctgcggaacaaggaaatcaaggccgccctgagaaaggtgctgggatctagcaacatcatctga

SEQ ID NO: 947 - DNA, 954 bp, Artificial Sequence
  OR52M1 consensus-c
atgctgacctttcacaacgtgtgcagcgtgcccagcagcttctggctgacaggcatccctggcctggaatctcttcatatctggctgagcatccctttcggaagcatgtacctggtcgccgtggtgggcaacgtgaccatcctggccgtggtgaaggtggagaggagcctgcaccagcctatgtacttcttcctgtgcatgctggctgtcatcgacctggtgctctccaccagcaccatgcccaagctgctgggcatcttttggttcggcgccggcgatatcggactggacgcctgtctggcccagatgttcctgatccactgtttcgccacagtggagtctggaatctttctggctatggccttcgaccgctacgtggccatttgcgaccccctgcggcacaccatggtgctgacccacaccgtggtcggcagactgggcctggccgctctgctcagaggcgtgctgtacatcggtcctctgcctctgatgatcagactgagactgcctctgtataagacccacgtgatcagccacagctactgtgaacacatggccgtggtgacactggcctgcggcgacagcagagtgaacaacgtgtacggcctgagcatcggcttcctggtgctgatcctggatagcgtggctatcgccgcctcctacgtgatgatctttagagccgtgatgggccttgccacccctgaggccagactgaagacactgggaacatgcggcagccacatctgcgccatcctgattttctacgtcccaatcgctgtttcttctctgatccacagattcggccactgcgtgcctccacctatccataccctgctggctaatttctacctgctgatcccccccatcctgaaccctattgtgtacgccgtgcggaccaaacagatccgggaacggctgctgcaaatccttaaaatcgagacaaagatcagatga

SEQ ID NO: 948 - DNA, 954 bp, Artificial Sequence
  OR52N5 consensus-c
atgctggtgtctaacaacagctatgtggcccctccatccttcatcctgaacggcatccctggcctggaaagagtgcatgtgtggattagcctgcctctgtgtaccatgtatatcattagcctggtcggcaacctgggcctcgtgtacctgatccactacgaggagtctctgcaccggcctatgtacttcttcctggctatgctgagcctcatcgacctgttcacatgcacaaccacactgcctaacgccctgtgcatcttctggttcaacctgaaggagatcaacttcaatgcctgcctggtgcagatgttctttgtgcacggcttcacaggcgtggaaagcggtgttctgatgctgatggccctggatagatacgtggctatctgttaccccctgagatacgccaccatcctgacaaaccccatcatcgccaaggctggactggccaccttcctgagaggcgtcctgctgatgatcccctttccatttctggtgaagcggctgcctttctgccagagcaatatcatcagccacacctactgcgaccacatgagcgtcgtgaaactgtcttgtgcctccatcaaggtgaacgtgatctacggcctgatggtggccctgctgataggagtgttcgacatctgctgcatcagtgtttcttacaccatgatcctgcgggccgtggtgtccctgagcagcgccgatgccagacagaaagccttcagcacctgcaccgcccacattagcgctatcatcatcacctacgtgcccgctttcttcaccttttttacccacaggttcggcggccacacaatccctcctagcctgcacatcatcgtggccaacctgtacctgctgctgccccctacactgaatcctatcgtgtacggcgtgaagaccaagcaaatcagagacagcgtgatcaagttcttccagggcgagaagggcgccggatga

SEQ ID NO: 949 - DNA, 948 bp, Artificial Sequence
  OR56A3 consensus-c
atgaccgcccaccagaacggcaccctcagcacagaagtcagcgatttcctgctgaactgctttgtgcgctcccctagctggcagctgtggctgtctttgcctctgtccctgcttttcctgctggctatgggcgccaacaccaccctgctgatcaccatcagacttgaggcctctctgcacgagccaatgtactacctgctgagcctgctgagcctgctggacatcgtgctgtgcctgacagttattcctaaggtgctggccatcttttggttcgacctgcggagcatcagcttccctgcatgcttccttcaaatgtacatcatgaactgtttcctggccatggaaagctgcaccttcatggtgatggcctacgacagatacgtggccatttgtcacccactgagataccccagcatcatcacagatcagttcgtggtgaaggccgccatctttatcctggctagaaacgtgctgatgaccctgcctatccccatcctgagcgccagactgcactactgcggaaggaacgtcatcgagaactgcatctgtgccaatatgagcgtgtctagactgtcatgcgacgatgtgaccatcaaccggctgtatcagttcgccggcggatggacactgttgggcagcgacctgatcctgatcttcctgtcctacaccctgatcctgagagccgtgctgcggctgaaggctgaaggcgccgtggccaaagccctgagtacctgcggcagccacttcatcctgatcctgttcttcagcacaatcctgctggtctttgtgctgacacacgtggctaagaagaaggtatctcctgacgtgcctgtgctgctgaatgtgctgcatcacgtgatccccgccgctctgaaccccatcgtgtacggcgtgcggacccaggagatcaagcagggcatccagagactgctgaagaaaggctggtga

SEQ ID NO: 950 - DNA, 939 bp, Artificial Sequence
  OR5I1 consensus-c
atgaccgacggcaattacacactggtgaccgagttcatcctgcttggattccctacaagacctgagctgcagatcgtgctgtttctggtctttctgacactgtactctatcatcctgattggcaacatcggcctgatgctgctgattagaatcgacccccacctgcaaacacctatgtacttcttcctgagcaacctgtccttcgtggacctgtgctactctagcgtgatcgtccccaagatgctggtgaacttcctgagcgagaacaaaagcatcagctactacggctgcgctctgcagttctacttcttctgcaccttcgccgacaccgaatcttttatcctggccgccatggcctacgaccggtacgtggccatctgtaatcctctgctgtacaccgtggtgatgagccgcggaatctgcatgagactgatcgtgctgtcttatctgggcggcaacatgagcagcctggttcatacatcctttgccttcatcctcaagtactgtgataagaacgtgatcaatcacttcttctgcgatctgcctcctctgcttaagctgagctgcaccgacacaaccatcaacgagtggctgctctctacctacggcagcagcgtggaaatcatctgcttcatcatcatcattatcagctacttcttcatcctgctgtctgtgctgaagatccggagcttcagcggcagaaagaaaacctttagcacctgtgccagccacctgaccagcgtgacaatctaccagggcaccctgctgttcatctacagtagacccagctacctgtatagcccaaacaccgataagatcataagcgtgttctacaccatcatcatccctgtgctgaaccccctgatctattccctgcggaacaaggacgtgaaggacgccgctaaaaaggtgctgagatccaaggtggatagctcctga

What is claimed is:

1. A method for expressing an olfactory receptor polypeptide, comprising
expressing, in a cell, an olfactory receptor polypeptide consisting of an amino acid sequence obtained by, in an amino acid sequence of an olfactory receptor of interest, altering at least one amino acid residue different from that in a consensus amino acid sequence to the amino acid residue at a position corresponding thereto in the consensus amino acid sequence, wherein
the consensus amino acid sequence is an amino acid sequence derived by alignment of the amino acid sequence of the olfactory receptor of interest and amino acid sequences of any of the following olfactory receptors (a) to (d):
(a) at least 11 olfactory receptors selected from the group consisting of olfactory receptors encoded by orthologs of the olfactory receptor of interest in the same order as that of an organism species from which the olfactory receptor of interest is derived;
(b) at least 11 olfactory receptors selected from the group consisting of the olfactory receptors encoded by orthologs of the olfactory receptor of interest in the same order as that of an organism species from which the olfactory receptor of interest is derived and olfactory receptors encoded by paralogs of the olfactory receptor of interest, the 11 olfactory receptors including at least one of the olfactory receptor encoded by the paralog of the olfactory receptor of interest;
(c) at least 11 olfactory receptors selected from the group consisting of olfactory receptors encoded by orthologs of the olfactory receptor of interest in vertebrates, the 11 olfactory receptors including at least one olfactory receptor encoded by a vertebrate ortholog in an order different from the order of an organism species from which the olfactory receptor of interest is derived; and
(d) at least 11 olfactory receptors selected from the group consisting of olfactory receptors encoded by orthologs of the olfactory receptor of interest in vertebrates and olfactory receptors encoded by orthologs in a vertebrate with a paralog having the highest homology to the olfactory receptor of interest among paralogs of the olfactory receptor of interest having 11 or more vertebrate orthologs, the 11 olfactory receptors including at least one olfactory receptor encoded by a vertebrate ortholog in an order different from the order of an organism species from which the olfactory receptor of interest is derived, and
an olfactory receptor encoded by the paralog.

2. The method according to claim 1, wherein the consensus amino acid sequence is an amino acid sequence consisting of consensus residues identified in accordance with the following criteria (i) to (iii) from the alignment of the amino acid sequence of the olfactory receptor of interest and the amino acid sequences of any of the olfactory receptors (a) to (d):
(i) at each amino acid position of the alignment,
(i-i) when there exists one amino acid residue which is different from the amino acid residue of the olfactory receptor of interest and has a frequency of appearance of 50% or more, the amino acid residue is identified as a consensus residue,
(i-ii) when there exist two amino acid residues having a frequency of appearance of 50%, the amino acid residues of the olfactory receptor of interest are identified as a consensus residue,
(i-iii) when there exists an amino acid residue in the olfactory receptor of interest and there exists no amino acid residue having a frequency of appearance of 40% or more, the absence of a consensus residue is identified,
(i-iv) when there exists no amino acid residue in the olfactory receptor of interest and there exists an amino acid residue having a frequency of appearance of 60% or more, an amino acid residue having the highest frequency of appearance is identified as a consensus residue, and when there exist two or more amino acid residues having the highest frequency of appearance, an amino acid residue having the smallest molecular weight among the amino acid residues is identified as a consensus residue, and
(i-v) if none of the above (i-i) to (i-iv) is appropriate, the amino acid residue of the olfactory receptor of interest is identified as a consensus residue;
(ii) when the consensus residues are identified in accordance with the criterion (i) and when a consensus residue nearest to the N terminus is a consensus residue at a position corresponding to the N terminus of the olfactory receptor of interest or a C-terminal side thereof and is not a methionine residue, a consensus residue on an N-terminal side of a consensus residue consisting of a methionine residue positioned nearest to the N terminus is changed to the absence of a consensus residue; and
(iii) when the consensus residues are identified in accordance with the criterion (i) and when a consensus residue nearest to the N terminus is a consensus residue at a position corresponding to an N-terminal side of the N terminus of the olfactory receptor of interest and is not a methionine residue, an amino acid residue having the highest frequency of appearance is identified as a consensus residue until a methionine residue appears by tracing back one by one amino acid positions on an N-terminal side of the position of the consensus residue of the alignment, and when there exist two or more amino acid residues having the highest frequency of appearance, an amino acid residue having the smallest molecular weight among the amino acid residues is identified as a consensus residue.

3. The method according to claim 1, wherein the alignment is alignment of the amino acid sequence of the olfactory receptor of interest and the olfactory receptors (c).

4. The method according to claim 1, wherein the olfactory receptor of interest is a human olfactory receptor.

5. The method according to claim 1, wherein the olfactory receptor polypeptide consists of an amino acid sequence obtained by, in an amino acid sequence of sequence identification number (2) of an olfactory receptor (1) in the following Tables 1-1 to 1-5 altering at least one amino acid residue different from that in a consensus amino acid sequence of sequence identification number (3) to the amino acid residue at a position corresponding thereto in the consensus amino acid sequence:
TABLE 1-1

| | | (2) SEQ ID NO of | (3) SEQ ID NO of |
|---|---|---|---|
| | (1) Olfactory | amino acid | consensus amino |
| No. | receptor | sequence | acid sequence |
| 1 | OR2A25 | 1 | 97 |
| 2 | OR2A25 | 1 | 98 |
| 3 | OR2A25 | 1 | 99 |
| 4 | OR2AG1 | 2 | 100 |
| 5 | OR2AG2 | 3 | 101 |
| 6 | OR2D2 | 4 | 102 |
| 7 | OR2D3 | 5 | 103 |
| 8 | OR2T11 | 6 | 104 |
| 9 | OR2T11 | 6 | 105 |
| 10 | OR2T11 | 6 | 106 |
| 11 | OR2W1 | 7 | 107 |
| 12 | OR2W1 | 7 | 108 |
| 13 | OR2W1 | 7 | 109 |
| 14 | OR2W3 | 8 | 110 |
| 15 | OR2Y1 | 9 | 111 |
| 16 | OR3A2 | 10 | 112 |
| 17 | OR4A16 | 11 | 113 |
| 18 | OR4C15 | 12 | 114 |
| 19 | OR4D5 | 13 | 115 |
| 20 | OR4D6 | 14 | 116 |
| 21 | OR4F15 | 15 | 117 |
| 22 | OR4K15 | 16 | 118 |
| 23 | OR4Q3 | 17 | 119 |
| 24 | OR4Q3 | 17 | 120 |
| 25 | OR4G3 | 17 | 121 |
| 26 | OR4S2 | 18 | 122 |
| 27 | OR4S2 | 18 | 123 |
| 28 | OR4S2 | 18 | 124 |
| 29 | OR5A2 | 19 | 125 |
| 30 | OR5C1 | 20 | 126 |
| 31 | OR5W2 | 21 | 127 |
| 32 | OR6A2 | 22 | 128 |
| 33 | OR6B2 | 23 | 129 |
| 34 | OR6C1 | 24 | 130 |
| 35 | OR6Y1 | 25 | 131 |
| 36 | OR6Y1 | 25 | 132 |
| 37 | OR6Y1 | 25 | 133 |
| 38 | OR7A17 | 26 | 134 |
| 39 | OR7A17 | 26 | 135 |
| 40 | OR7A17 | 26 | 136 |
| 41 | OR7D4 | 27 | 137 |
| 42 | OR7D4 | 27 | 138 |
| 43 | OR7D4 | 27 | 139 |
| 44 | OR10A2 | 28 | 140 |
| 45 | OR10A4 | 29 | 141 |
| 46 | OR10D3 | 30 | 142 |
| 47 | OR10Q1 | 31 | 143 |
| 48 | OR10Z1 | 32 | 144 |
| 49 | OR11H1 | 33 | 145 |
| 50 | OR11H4 | 34 | 146 |
| 51 | OR11H4 | 34 | 147 |
| 52 | OR11H4 | 34 | 148 |
| 53 | OR13C8 | 35 | 149 |
| 54 | OR13G1 | 36 | 150 |
| 55 | OR52A4 | 37 | 151 |
| 56 | OR56A4 | 38 | 152 |

TABLE 1-2

| | | (2) SEQ ID NO of | (3) SEQ ID NO of |
|---|---|---|---|
| | (1) Olfactory | amino acid | consensus amino |
| No. | receptor | sequence | acid sequence |
| 57 | OR2B11 | 39 | 153 |
| 58 | OR2C3 | 40 | 154 |
| 59 | OR2G2 | 41 | 155 |
| 60 | OR2G3 | 42 | 156 |
| 61 | OR2L2 | 43 | 157 |
| 62 | OR2L3 | 44 | 158 |
| 63 | OR2L5 | 45 | 159 |
| 64 | OR2L8 | 46 | 160 |
| 65 | OR2L13 | 47 | 161 |
| 66 | OR2M2 | 48 | 162 |
| 67 | OR2M4 | 49 | 163 |
| 68 | OR2T1 | 50 | 164 |
| 69 | OR2T4 | 51 | 165 |
| 70 | OR2T5 | 52 | 166 |
| 71 | OR2T6 | 53 | 167 |
| 72 | OR2T7 | 54 | 168 |
| 73 | OR2T8 | 55 | 169 |
| 74 | OR2T12 | 56 | 170 |
| 75 | OR2T27 | 57 | 171 |
| 76 | OR2T29 | 58 | 172 |
| 77 | OR2T33 | 59 | 173 |
| 78 | OR2T34 | 60 | 174 |
| 79 | OR2T35 | 61 | 175 |
| 80 | OR2AK2 | 62 | 176 |
| 81 | OR4D10 | 63 | 177 |
| 82 | OR4E2 | 64 | 178 |
| 83 | OR4F5 | 65 | 179 |
| 84 | OR4K1 | 66 | 180 |
| 85 | OR4K2 | 67 | 181 |
| 86 | OR4K5 | 68 | 182 |
| 87 | OR4K17 | 69 | 183 |
| 88 | OR4L1 | 70 | 184 |
| 89 | OR4M1 | 71 | 185 |
| 90 | OR4N2 | 72 | 186 |
| 91 | OR4N5 | 73 | 187 |
| 92 | OR5A1 | 74 | 188 |
| 93 | OR6F1 | 75 | 189 |
| 94 | OR6J1 | 76 | 190 |
| 95 | OR7A10 | 77 | 191 |
| 96 | OR7C2 | 78 | 192 |
| 97 | OR7G2 | 79 | 193 |
| 98 | OR7G3 | 80 | 194 |
| 99 | OR10G2 | 81 | 195 |
| 100 | OR10J1 | 82 | 196 |
| 101 | OR10J3 | 83 | 197 |
| 102 | OR10K1 | 84 | 198 |
| 103 | OR10K2 | 85 | 199 |
| 104 | OR10T2 | 86 | 200 |
| 105 | OR10X1 | 87 | 201 |
| 106 | OR11G2 | 88 | 202 |
| 107 | OR11H6 | 89 | 203 |
| 108 | OR11H7 | 90 | 204 |
| 109 | OR11L1 | 91 | 205 |
| 110 | OR14A2 | 92 | 206 |
| 111 | OR14A16 | 93 | 207 |
| 112 | OR14C36 | 94 | 208 |
| 113 | OR14K1 | 95 | 209 |

TABLE 1-3

| | | (2) SEQ ID NO of | (3) SEQ ID NO of |
|---|---|---|---|
| | (1) Olfactory | amino acid | consensus amino |
| No. | receptor | sequence | acid sequence |
| 115 | OR1B1 | 327 | 485 |
| 116 | OR1D2 | 328 | 486 |
| 117 | OR1D4 | 329 | 487 |
| 118 | OR1E2 | 330 | 488 |
| 119 | OR1F1 | 331 | 489 |
| 120 | OR1G1 | 332 | 490 |
| 121 | OR1I1 | 333 | 491 |
| 122 | OR1J1 | 334 | 492 |
| 123 | OR1J4 | 335 | 493 |
| 124 | OR1K1 | 336 | 494 |
| 125 | OR1L1 | 337 | 495 |
| 126 | OR1L3 | 338 | 496 |
| 127 | OR1L4 | 339 | 497 |
| 128 | OR1L6 | 340 | 498 |
| 129 | OR1L8 | 341 | 499 |
| 130 | OR1M1 | 342 | 500 |
| 131 | OR1Q1 | 343 | 501 |
| 132 | OR1S1 | 344 | 502 |
| 133 | OR1S2 | 345 | 503 |
| 134 | OR2A1 | 346 | 504 |
| 135 | OR2A5 | 347 | 505 |
| 136 | OR2A7 | 348 | 506 |
| 137 | OR2A14 | 349 | 507 |
| 138 | OR2B2 | 350 | 508 |
| 139 | OR2B3 | 351 | 509 |
| 140 | OR2B6 | 352 | 510 |
| 141 | OR2C1 | 353 | 511 |
| 142 | OR2F1 | 354 | 512 |
| 143 | OR2F2 | 355 | 513 |
| 144 | OR2H1 | 356 | 514 |
| 145 | OR2H2 | 357 | 515 |
| 146 | OR2K2 | 358 | 516 |
| 147 | OR2S2 | 359 | 517 |
| 148 | OR2V1 | 360 | 518 |
| 149 | OR2V2 | 361 | 519 |
| 150 | OR2Z1 | 362 | 520 |
| 151 | OR2AE1 | 363 | 521 |
| 152 | OR2AP1 | 364 | 522 |
| 153 | OR2AT4 | 365 | 523 |
| 154 | OR3A1 | 366 | 524 |
| 155 | OR3A3 | 367 | 525 |
| 156 | OR4A5 | 368 | 526 |
| 157 | OR4A15 | 369 | 527 |
| 158 | OR4A47 | 370 | 528 |
| 159 | OR4B1 | 371 | 529 |
| 160 | OR4C3 | 372 | 530 |
| 161 | OR4C6 | 373 | 531 |
| 162 | OR4C11 | 374 | 532 |
| 163 | OR4C12 | 375 | 533 |
| 164 | OR4C16 | 376 | 534 |
| 165 | OR4C46 | 377 | 535 |
| 166 | OR4D1 | 378 | 536 |
| 167 | OR4D2 | 379 | 537 |
| 168 | OR4D9 | 380 | 538 |
| 169 | OR4D11 | 381 | 539 |
| 170 | OR4F17 | 382 | 540 |
| 171 | OR4F21 | 383 | 541 |
| 172 | OR4P4 | 384 | 542 |
| 173 | OR4X1 | 385 | 543 |
| 174 | OR4X2 | 386 | 544 |
| 175 | OR5B2 | 387 | 545 |
| 176 | OR5B12 | 388 | 546 |
| 177 | OR5B17 | 389 | 547 |
| 178 | OR5H1 | 390 | 548 |
| 179 | OR5H2 | 391 | 549 |
| 180 | OR5H6 | 392 | 550 |
| 181 | OR5H14 | 393 | 551 |
| 182 | OR5K3 | 394 | 552 |
| 183 | OR5AK2 | 395 | 553 |
| 184 | OR5AR1 | 396 | 554 |
| 185 | OR5AS1 | 397 | 555 |
| 186 | OR6B1 | 398 | 556 |
| 187 | OR6B3 | 399 | 557 |
| 188 | OR6C2 | 400 | 558 |
| 189 | OR6C3 | 401 | 559 |
| 190 | OR6C4 | 402 | 560 |
| 191 | OR6C6 | 403 | 561 |
| 192 | OR6C65 | 404 | 562 |
| 193 | OR6C68 | 405 | 563 |
| 194 | OR6C70 | 406 | 564 |

TABLE 1-4

| | | (2) SEQ ID NO of | (3) SEQ ID NO of |
|---|---|---|---|
| | (1) Olfactory | amino acid | consensus amino |
| No. | receptor | sequence | acid sequence |
| 195 | OR6C74 | 407 | 565 |
| 196 | OR6C75 | 408 | 566 |
| 197 | OR6C76 | 409 | 567 |
| 198 | OR6K3 | 410 | 568 |
| 199 | OR6K6 | 411 | 569 |
| 200 | OR6N2 | 412 | 570 |
| 201 | OR8S1 | 413 | 571 |
| 202 | OR9A2 | 414 | 572 |
| 203 | OR9A4 | 415 | 573 |
| 204 | OR10A3 | 416 | 574 |
| 205 | OR10A7 | 417 | 575 |
| 206 | OR10G6 | 418 | 576 |
| 207 | OR10G9 | 419 | 577 |
| 208 | OR10H1 | 420 | 578 |
| 209 | OR10H2 | 421 | 579 |
| 210 | OR10H3 | 422 | 580 |
| 211 | OR10H4 | 423 | 581 |
| 212 | OR10H5 | 424 | 582 |
| 213 | OR10P1 | 425 | 583 |
| 214 | OR10S1 | 426 | 584 |
| 215 | OR10V1 | 427 | 585 |
| 216 | OR10W1 | 428 | 586 |
| 217 | OR10AD1 | 429 | 587 |
| 218 | OR10AG1 | 430 | 588 |
| 219 | OR11A1 | 431 | 589 |
| 220 | OR11H2 | 432 | 590 |
| 221 | OR12D2 | 433 | 591 |
| 222 | OR12D3 | 434 | 592 |
| 223 | OR13A1 | 435 | 593 |
| 224 | OR13C2 | 436 | 594 |
| 225 | OR13C3 | 437 | 595 |
| 226 | OR13C4 | 438 | 596 |
| 227 | OR13C9 | 439 | 597 |
| 228 | OR13F1 | 440 | 598 |
| 229 | OR51A2 | 441 | 599 |
| 230 | OR51A4 | 442 | 600 |
| 231 | OR51A7 | 443 | 601 |
| 232 | OR51B2 | 444 | 602 |
| 233 | OR51B4 | 445 | 603 |
| 234 | OR51B5 | 446 | 604 |
| 235 | OR51B6 | 447 | 605 |
| 236 | OR51D1 | 448 | 606 |
| 237 | OR51E2 | 449 | 607 |
| 238 | OR51F1 | 450 | 608 |
| 239 | OR51F2 | 451 | 609 |
| 240 | OR51G1 | 452 | 610 |
| 241 | OR51G2 | 453 | 611 |
| 242 | OR51I1 | 454 | 612 |
| 243 | OR51I2 | 455 | 613 |
| 244 | OR51J1 | 456 | 614 |
| 245 | OR51L1 | 457 | 615 |
| 246 | OR51M1 | 458 | 616 |
| 247 | OR51Q1 | 459 | 617 |
| 248 | OR51S1 | 460 | 618 |
| 249 | OR51T1 | 461 | 619 |
| 250 | OR51V1 | 462 | 620 |
| 251 | OR52A1 | 463 | 621 |
| 252 | OR52A5 | 464 | 622 |
| 253 | OR52B2 | 465 | 623 |
| 254 | OR52B4 | 466 | 624 |
| 255 | OR52B6 | 467 | 625 |
| 256 | OR52D1 | 468 | 626 |
| 257 | OR52E5 | 469 | 627 |
| 258 | OR52E6 | 470 | 628 |
| 259 | OR52H1 | 471 | 629 |
| 260 | OR52I1 | 472 | 630 |
| 261 | OR52I2 | 473 | 631 |
| 262 | OR52J3 | 474 | 632 |
| 263 | OR52K1 | 475 | 633 |
| 264 | OR52K2 | 476 | 634 |
| 265 | OR52N1 | 477 | 635 |
| 266 | OR52R1 | 478 | 636 |
| 267 | OR52W1 | 479 | 637 |
| 268 | OR56A5 | 480 | 638 |
| 269 | OR56B4 | 481 | 639 |
| 270 | OR5AN1 | 482 | 640 |
| 271 | M71 | 483 | 641 |

TABLE 1-5

| | | (2) SEQ ID NO of | (3) SEQ ID NO of |
|---|---|---|---|
| | (1) Olfactory | amino acid | consensus amino |
| No. | receptor | sequence | acid sequence |
| 273 | OR2A2 | 801 | 851 |
| 274 | OR2A12 | 802 | 852 |
| 275 | OR4S1 | 803 | 853 |
| 276 | OR5AC2 | 804 | 854 |
| 277 | OR5B3 | 805 | 855 |
| 278 | OR5D13 | 806 | 856 |
| 279 | OR5D14 | 807 | 857 |
| 280 | OR5D16 | 808 | 858 |
| 281 | OR5D18 | 809 | 859 |
| 282 | OR5J2 | 810 | 860 |
| 283 | OR5K4 | 811 | 861 |
| 284 | OR5L1 | 812 | 862 |
| 285 | OR5L2 | 813 | 863 |
| 286 | OR5M1 | 814 | 864 |
| 287 | OR5M3 | 815 | 865 |
| 288 | OR5M8 | 816 | 866 |
| 289 | OR5M9 | 817 | 867 |
| 290 | OR5M10 | 818 | 868 |
| 291 | OR5M11 | 819 | 869 |
| 292 | OR5P2 | 820 | 870 |
| 293 | OR5T1 | 821 | 871 |
| 294 | OR5T2 | 822 | 872 |
| 295 | OR5T3 | 823 | 873 |
| 296 | OR6M1 | 824 | 874 |
| 297 | OR6N1 | 825 | 875 |
| 298 | OR6P1 | 826 | 876 |
| 299 | OR6Q1 | 827 | 877 |
| 300 | OR6T1 | 828 | 878 |
| 301 | OR6X1 | 829 | 879 |
| 302 | OR8B4 | 830 | 880 |
| 303 | OR8B8 | 831 | 881 |
| 304 | OR8B12 | 832 | 882 |
| 305 | OR8D1 | 833 | 883 |
| 306 | OR8G1 | 834 | 884 |
| 307 | OR8G5 | 835 | 885 |
| 308 | OR8H2 | 836 | 886 |
| 309 | OR8I2 | 837 | 887 |
| 310 | OR8J1 | 838 | 888 |
| 311 | OR8K1 | 839 | 889 |
| 312 | OR8K3 | 840 | 890 |
| 313 | OR8K5 | 841 | 891 |
| 314 | OR8U1 | 842 | 892 |
| 315 | OR9G1 | 843 | 893 |
| 316 | OR9G4 | 844 | 894 |
| 317 | OR9I1 | 845 | 895 |
| 318 | OR11H12 | 846 | 896 |
| 319 | OR52M1 | 847 | 897 |
| 320 | OR52N5 | 848 | 898 |
| 321 | OR56A3 | 849 | 899. |

6. The method according to claim 5, wherein the olfactory receptor polypeptide consists of an amino acid sequence of any of SEQ ID NOs: 97 to 209, 485 to 641, and 851 to 899.

7. A method for expressing an olfactory receptor polypeptide, comprising
expressing, in a cell, an olfactory receptor polypeptide consisting of an amino acid sequence obtained by, in an amino acid sequence of an olfactory receptor of interest, altering at least one amino acid residue different from that in a consensus amino acid sequence to the amino acid residue at a position corresponding thereto in the consensus amino acid sequence, wherein
the olfactory receptor polypeptide consists of an amino acid sequence obtained by, in an amino acid sequence of SEQ ID NO: 96 of a human olfactory receptor OR7E24, altering at least one amino acid residue different from that in a consensus amino acid sequence of SEQ ID NO: 210 to the amino acid residue at a position corresponding thereto in the consensus amino acid sequence,
the olfactory receptor polypeptide consists of an amino acid sequence obtained by, in an amino acid sequence of SEQ ID NO: 484 of a human olfactory receptor OR9K2, altering at least one amino acid residue different from that in a consensus amino acid sequence of SEQ ID NO: 642 to the amino acid residue at a position corresponding thereto in the consensus amino acid sequence, or
the olfactory receptor polypeptide consists of an amino acid sequence obtained by, in an amino acid sequence of SEQ ID NO: 850 of a human olfactory receptor OR5I1, altering at least one amino acid residue different from that in a consensus amino acid sequence of SEQ ID NO: 900 to the amino acid residue at a position corresponding thereto in the consensus amino acid sequence.

8. The method according to claim 7, wherein the olfactory receptor polypeptide consists of an amino acid sequence of SEQ ID NO: 210, 642, or 900.

9. A method for measuring a response of an olfactory receptor of interest, comprising
measuring a response of an olfactory receptor polypeptide expressed by the method according to claim 1.

10. A method for searching for a ligand for an olfactory receptor of interest, comprising:
measuring a response of an olfactory receptor polypeptide expressed by the method according to 1 in the presence of a test substance; and
selecting a test substance to which the olfactory receptor polypeptide has responded.

11. A method for evaluating and/or selecting a suppressor of odor of a ligand for an olfactory receptor of interest, comprising:
adding a test substance and the ligand for an olfactory receptor of interest to an olfactory receptor polypeptide expressed by the method according to claim 1; and
measuring a response of the olfactory receptor polypeptide to the ligand.

12. A method for evaluating and/or selecting a suppressor of odor of a ligand for an olfactory receptor of interest, comprising:
adding a test substance to an olfactory receptor polypeptide expressed by the method according to claim 1; and
measuring a response of the olfactory receptor polypeptide to the test substance.

13. A method for evaluating and/or selecting an enhancer of odor of a ligand for an olfactory receptor of interest, comprising:
adding a test substance and the ligand for an olfactory receptor of interest to an olfactory receptor polypeptide expressed by the method according to claim 1; and
measuring a response of the olfactory receptor polypeptide to the ligand.

14. The method according to claim 9, wherein the response of the olfactory receptor polypeptide is measured through intracellular cAMP level measurement by ELISA or reporter gene assay, calcium ion level measurement by calcium imaging or TGFα shedding assay, or potential change measurement inside and outside cell membranes by a two-electrode voltage clamp technique using Xenopus oocytes.

15. An altered olfactory receptor polypeptide consisting of
an amino acid sequence obtained by, in an amino acid sequence of an olfactory receptor of interest, altering at least one amino acid residue different from that in a consensus amino acid sequence to the amino acid residue at a position corresponding thereto in the consensus amino acid sequence, wherein
the consensus amino acid sequence is an amino acid sequence obtained by alignment of the amino acid sequence of the olfactory receptor of interest and amino acid sequences of any of the following olfactory receptors (a) to (d):
(a) at least 11 olfactory receptors selected from the group consisting of olfactory receptors encoded by orthologs of the olfactory receptor of interest in the same order as that of an organism species from which the olfactory receptor of interest is derived;
(b) at least 11 olfactory receptors selected from the group consisting of the olfactory receptors encoded by orthologs of the olfactory receptor of interest in the same order as that of an organism species from which the olfactory receptor of interest is derived and olfactory receptors encoded by paralogs of the olfactory receptor of interest, the 11 olfactory receptors including at least one of the olfactory receptor encoded by the paralog of the olfactory receptor of interest;
(c) at least 11 olfactory receptors selected from the group consisting of olfactory receptors encoded by orthologs of the olfactory receptor of interest in vertebrates, the 11 olfactory receptors including at least one olfactory receptor encoded by a vertebrate ortholog in an order different from the order of an organism species from which the olfactory receptor of interest is derived; and
(d) at least 11 olfactory receptors selected from the group consisting of the olfactory receptors encoded by orthologs of the olfactory receptor of interest in vertebrates and olfactory receptors encoded by orthologs in a vertebrate with a paralog having the highest homology to the olfactory receptor of interest among paralogs of the olfactory receptor of interest having 11 or more vertebrate orthologs, the 11 olfactory receptors including at least one olfactory receptor encoded by a vertebrate orthologs in an order different from the order of an organism species from which the olfactory receptor of interest is derived, and
an olfactory receptor encoded by the paralog.

16. The altered olfactory receptor polypeptide according to claim 15, wherein the consensus amino acid sequence is an amino acid sequence consisting of consensus residues identified in accordance with the following criteria (i) to (iii) from the alignment of the amino acid sequence of the olfactory receptor of interest and the amino acid sequences of any of the olfactory receptors (a) to (d):
(i) at each amino acid position of the alignment,
(i-i) when there exists one amino acid residue which is different from the amino acid residue of the olfactory receptor of interest and has a frequency of appearance of 50% or more, the amino acid residue is identified as a consensus residue,
(i-ii) when there exist two amino acid residues having a frequency of appearance of 50%, the amino acid residues of the olfactory receptor of interest are identified as a consensus residue,
(i-iii) when there exists an amino acid residue in the olfactory receptor of interest and there exists no amino acid residue having a frequency of appearance of 40% or more, the absence of a consensus residue is identified,
(i-iv) when there exists no amino acid residue in the olfactory receptor of interest and there exists an amino acid residue having a frequency of appearance of 60% or more, an amino acid residue having the highest frequency of appearance is identified as a consensus residue, and when there exist two or more amino acid residues having the highest frequency of appearance, an amino acid residue having the smallest molecular weight among the amino acid residues is identified as a consensus residue, and
(i-v) if none of the above (i-i) to (i-iv) is appropriate, the amino acid residue of the olfactory receptor of interest is identified as a consensus residue;
(ii) when the consensus residues are identified in accordance with the criterion (i) and when a consensus residue nearest to the N terminus is a consensus residue at a position corresponding to the N terminus of the olfactory receptor of interest or a C-terminal side thereof and is not a methionine residue, a consensus residue on an N-terminal side of a consensus residue consisting of a methionine residue positioned nearest to the N terminus is changed to the absence of a consensus residue; and
(iii) when the consensus residues are identified in accordance with the criterion (i) and when a consensus residue nearest to the N terminus is a consensus residue at a position corresponding to an N-terminal side of the N terminus of the olfactory receptor of interest and is not a methionine residue, an amino acid residue having the highest frequency of appearance is identified as a consensus residue until a methionine residue appears by tracing back one by one amino acid positions on an N-terminal side of the position of the consensus residue of the alignment, and when there exist two or more amino acid residues having the highest frequency of appearance, an amino acid residue having the smallest molecular weight among the amino acid residues is identified as a consensus residue.

17. The altered olfactory receptor polypeptide according to claim 15, wherein the alignment is alignment of the amino acid sequence of the olfactory receptor of interest and the olfactory receptors (c).

18. The altered olfactory receptor polypeptide according to claim 15, wherein the olfactory receptor of interest is a human olfactory receptor.

19. The altered olfactory receptor polypeptide according to claim 15, wherein the olfactory receptor polypeptide consists of an amino acid sequence obtained by, in an amino acid sequence of sequence identification number (2) of an olfactory receptor (1) in Tables 1-1 to 1-5, altering at least one amino acid residue different from that in a consensus amino acid sequence of sequence identification number (3) to the amino acid residue at a position corresponding thereto in the consensus amino acid sequence.

20. The altered olfactory receptor polypeptide according to claim 19 which consists of an amino acid sequence of any of SEQ ID NOs: 97 to 209, 485 to 641, and 851 to 899.

21. An altered olfactory receptor polypeptide
consisting of an amino acid sequence obtained by, in an amino acid sequence of SEQ ID NO: 96 of a human olfactory receptor OR7E24, altering at least one amino acid residue different from that in a consensus amino acid sequence of SEQ ID NO: 210 to the amino acid residue at a position corresponding thereto in the consensus amino acid sequence,
consisting of an amino acid sequence obtained by, in an amino acid sequence of SEQ ID NO: 484 of a human olfactory receptor OR9K2, altering at least one amino acid residue different from that in a consensus amino acid sequence of SEQ ID NO: 642 to the amino acid residue at a position corresponding thereto in the consensus amino acid sequence, or
consisting of an amino acid sequence obtained by, in an amino acid sequence of SEQ ID NO: 850 of a human olfactory receptor OR5I1, altering at least one amino acid residue different from that in a consensus amino acid sequence of SEQ ID NO: 900 to the amino acid residue at a position corresponding thereto in the consensus amino acid sequence.

22. The altered olfactory receptor polypeptide according to claim 21 which consists of an amino acid sequence of SEQ ID NO: 210, 642, or 900.

23. A polynucleotide encoding the altered olfactory receptor polypeptide according to claim 15.

24. A vector or a DNA fragment comprising the polynucleotide according to claim 23.

25. A transformed cell comprising the vector or the DNA fragment according to claim 24.
